(19) United States
(12) Patent Application Publication
(10) Pub. No.: US 2021/0335453 A1
(43) Pub. Date: Oct. 28, 2021

(54) NOVEL ENZYMES

(71) Applicant: UNIVERSITY COURT OF THE UNIVERSITY OF ST ANDREWS, St Andrews, Fife (GB)

(72) Inventor: Rebecca Goss, St Andrews (GB)

(21) Appl. No.: 16/978,441

(22) PCT Filed: Mar. 5, 2019
(86) PCT No.: PCT/GB2019/050612

§ 371 Date: Sep. 4, 2020

(30) Foreign Application Priority Data
Mar. 5, 2018 (GB) 1803491.8

(51) Int. Cl. G16B 30/10; C12N 9/02; G16B 30/20; C12P 1/00

(52) U.S. Cl. CPC G16B 30/10; C12N 9/0071; C12Y 114/19; C12P 1/00; G16B 30/20

(57) ABSTRACT

The present disclosure is based on the identification of a novel sequence motif present in halogenase type enzymes. From this, the disclosure provides methods for identifying and or detecting halogenases (halogenating enzymes) and novel halogenases identifiable using such methods. The disclosure also provides a novel cohort of enzymes and novel methods for achieving substrate halogenation.

### CROSS-REFERENCE TO RELATED APPLICATIONS

[0001] This application is U.S. national stage filing, under 35 U.S.C. § 371(c), of International Application No. PCT/GB2019/050612, filed on Mar. 5, 2019, which claims priority to United Kingdom Patent Application No. 1803491.8, filed on Mar. 5, 2018. The entire contents of each of the aforementioned applications are incorporated herein by reference.

### REFERENCE TO SEQUENCE LISTING

[0002] This application contains a Sequence Listing in computer readable form, which has been submitted electronically via EFS-web in ASCII format. Said ASCII copy, created on Jan. 5, 2020, is named Seq_Listing_123088_03301.txt, and is 713,463 bytes in size. The computer readable form of the sequence listing is part of the specification or is otherwise incorporated herein by reference.

### FIELD OF THE INVENTION

[0003] The present invention provides methods for identifying and or detecting halogenases (halogenating enzymes) and novel halogenases identifiable using such methods. The disclosure also provides a novel cohort of enzymes and novel methods for achieving substrate halogenation.

### BACKGROUND TO THE INVENTION

[0004] The fine chemical, pharmaceutical and agrochemical industries have an increasing interest in utilizing biocatalysts in process. The need to develop more selective, greener, and more cost effective synthesis drives this shift within the industry, and it is imperative that new enzymes are discovered and developed for process.

[0005] The introduction of one (or more) halogens into an organic molecule, is one of the most important and frequently utilised transformations in organic synthesis. Around 20% of the active pharmaceutical ingredients (APIs) and ˜30% of agrochemicals are halogenated, including some of the top-revenue agrochemicals such as sitagliptin with annual sales of $3.6 billion and aripiprazole with an annual revenue of $7.9 billion. Similarly, 7 out of the top-10 bestselling drugs over the last decade in the United States contain one or more halogen atoms.

[0006] The incorporation of a halogen can have a striking and beneficial impact on a molecule's bioactivity and bioavailability and half-life furthermore the incorporation of a chlorine or bromine into an aromatic system can provide a chemically reactive and orthogonal handle for selective modification through cross coupling chemistry.

[0007] Whilst these market sizes for halogenated compounds are significant, halogenation is missing from the industrial biocatalytic portfolio. In contrast to synthetic chemical alternatives, halogenating enzymes afford the highly regiospecific incorporation of a halogen into an organic molecule, obviating the need for functional group protection. The mild reaction conditions (physiological pH and temperature), aqueous solvents and the biodegradable catalyst, provide an attractive alternative to chemical halogenation, which usually utilises harsh conditions, noxious reagents or generates harmful by-products.

[0008] Research into electrophilic flavin-dependent halogenases (FDHs) has been limited, almost exclusively, to enzymes identified from halogenated natural products and their associated biosynthetic gene clusters (BGCs). The most well studied FDHs are the bacterial tryptophan halogenases, which chlorinate or brominate the biosynthetic precursor, tryptophan, regiospecifically at the 5, 6 or 7 position of the indole ring. Despite their narrow substrate scope and relatively low activity, work has focused on expanding the substrate scope of these halogenases through the application of protein engineering using either rational design or directed evolution.

[0009] The aim of this disclosure is to address the need for new halogenases, which can selectively halogenate a greater range of substrates with tolerance expanded substrate specificity. Using the novel methods described herein, the investigators have determined the first definitive approach for identifying FDHs in silico, their methodologies enable the discovery of FDHs with a broader and more diverse innate substrate specificity than that seen in any other previously investigated wild type FDHs.

### SUMMARY OF THE INVENTION

[0010] The present disclosure is based on the identification of a novel sequence motif present in halogenase type enzymes. The disclosure provides methods of identifying halogenase type enzymes (that is proteins (enzymes) with halogenation activity/enzymes that carry out, for example, chlorination, bromination and iodination), nucleic acid sequences encoding halogenases, halogenases identified (or identifiable or obtainable) by such methods and a cohort of novel halogenases—including enzymes capable of iodination.

[0011] The identified motif may be referred to as a “consensus” motif and may comprise the following consensus sequence:

(SEQ ID 1)
Fx•Px•Sx•G

[0012] Wherein:
[0013] “x” is any amino acid; and
[0014] each “•” represents independently the number of X residues (“X's”) between each conserved (F, P, S and G) residue; thus each “•” can independently represent any number of amino acid residues (for example zero, one, two . . . ten amino acids etc)
[0015] In one embodiment, the consensus sequence may be

(SEQ ID NO: 2)
FxxPxxSxG

[0016] This newly identified consensus motif has been shown to exist in all active flavin-dependent halogenases FDHs including all prior art FDHs and can therefore be regarded as a feature of a halogenase with which to definitively determine its activity. Further, the motif is absent from flavin-dependent enzymes that mediate other reactions such as oxygenations.

[0017] Thus the methods described herein exploit the consensus motifs described herein to provide a rapid and reliable method of identifying proteins with halogenase activity.

[0018] Accordingly, the disclosure provides a method of detecting and/or identifying diverse halogenases (enzymes (or proteins) with halogenating activity with very different substrate specificity). The methods may be described as being based on sequence and phylogeny data and advantageously allow the identification of new halogenating enzymes which are capable of accepting a wider range of substrates.

[0019] The disclosure provides a method of identifying or detecting halogenases (halogenating enzymes or enzymes (proteins) with halogenating activity), said method comprising probing or screening sequences for the presence of a motif or consensus sequence/motif having the sequence:

(SEQ ID NO: 1)
Fx•Px•Sx•G
or
(SEQ ID NO: 2)
FxxPxxSxG

[0020] or a sequence encoding the same.

[0021] The above described method may be used to identify or detect amino acid sequences which potentially encode halogenases, wherein an amino acid sequence which is found to comprising either the motif of SEQ ID NO: 1 or SEQ ID NO: 2 may be an amino acid sequence which encodes a halogenase.

[0022] (Note: hereinafter, references to SEQ ID NOS: 1/2 shall be taken to be a reference to either SEQ ID NO: 1 or SEQ ID NO: 2 or to SEQ ID NO(S) 1 and/or 2)

[0023] Halogenating enzymes identified and/or detected by a method of this disclosure have been shown to exhibit broad substrate specificity.

[0024] Without wishing to be bound by theory, the residues of the motif provided by SEQ ID NO: 1/2 are present in a loop that separates the active site from the isoalloxazine ring of the flavin cofactor binding pocket. This loop is always present in FDHs whether they act on a free or enzyme tethered substrate. Further, the inventors have determined that, in contrast to other motifs, (for example the GxGxxG motif) which may be conserved in all monooxygenases, (and therefore cannot be used alone to determine halogenase function), the presence of the Fx•Px•Sx•G/FxxPxxSxG loop confidently and reliably predicts FDH function.

[0025] Again, without wishing to be bound by theory, it is suggested that the Fx•Px•Sx•G/FxxPxxSxG loop plays a role in substrate specificity and active site configuration; this may explain why the motif has been retained and protected from spontaneous mutations.

[0026] Methods of detecting or identifying halogenase enzymes based on the Fx•Px•Sx•G/FxxPxxSxG motif, represent an advantage over prior art methods as this motif is absent from flavin-dependent enzymes that mediate other reactions such as oxygenations. Thus, the identification of this motif has, for the first time, enabled the definitive identification of halogenase type enzymes in silico. Further, using the motif of SEQ ID NO: 1/2 in combination with mechanistic and structural knowledge, it is possible to predict halogenase function even at low sequence similarity.

[0027] A sequence subjected to the method described herein and screened or probed for the presence of the motif provided by SEQ ID NO: 1/2 may be any suitable sequence including suitable nucleic acid and/or amino acid sequences. A suitable sequence may include, for example a deposited sequence (i.e. a sequence deposited within some form of database, for example a publically accessible sequence data base), and uncurated deposited sequence, hypothetical protein sequences, unannotated sequences, genomic sequences and the like. The suitable sequence might also be sequences within these uncurated databases that have been partially annotated as “putative halogenase” or misannotated with some other functionality, e.g. monooxygenase. Sequences that may be subject to the methods described herein may be prokaryotic or eukaryotic in origin; they may be derived from microorganisms (for example bacterial and/or viral sequences), fungi, plants and/or animals.

[0028] The methods described herein enable the user to identify halogenases, in silico, from, for example, the deposited genome sequences of a diverse series of organisms; this is an attractive alternative, the exploration of genes from phylogenetically distinct organisms enables the discovery of halogenases with very different substrate scope, and in all cases has revealed broader innate substrate scope than previously identified wild type halogenases, and on a par with the breadth of substrate specificity observed for engineered halogenases; whilst in other cases the substrate specificity exceeds that of even the best engineered halogenases in which known halogenases are redesigned or evolved.

[0029] The process of screening and/or probing a sequence may be referred to as “mining”. Thus, a sequence may be mined for the presence of the sequence motif(s) identified and disclosed herein. A sequence which contains, for example, the motif provided by SEQ ID NO: 1a/b (or a nucleic acid sequence encoding the same), may be identified as a sequence encoding or providing a flavin dependent halogenase enzyme.

[0030] It should be noted that where the sequence is a nucleic acid sequence, the use of a method described herein may identify and/or detect a nucleotide sequence encoding the motif of SEQ ID NO: 1/2. Upon detection of a nucleotide sequence encoding the motif of SEQ ID NO: 1/2, the nucleic acid sequence may be identified as a sequence which may encode a halogenating enzyme.

[0031] Table 1 below, provides an indication of those nucleotide codons which encode the F, P, S and G residues of the motif provided by SEQ ID NO: 1/2. Identification of a nucleotide sequence, containing these codons (in an arrangement encoding the motif of SEQ ID NO: 1) identifies that nucleic acid sequence as potentially encoding a halogenating enzyme.

TABLE 1

| | | | | | | | |
|---|---|---|---|---|---|---|---|
| MOTIF | F | x. | P | x. | S | x. | G |

| | | | | |
|---|---|---|---|---|
| CODONS | TTT | CCT | TCT | GGT |
| | TTC | CCC | TCC | GGC |
| | | CCA | TCA | GGA |
| | | CCG | TCG | GGG |
| | | | AGT | |
| | | | AGC | |

[0032] The methods described herein may be combined with a probe or screen for one or more other motifs at either the nucleic acid or amino acid/peptide level. For example, the one or more other motifs may be characteristic (or at least partially characteristic) of a halogenating enzyme.

[0033] The described methods may further probe or screen sequences for a motif having the sequence:

(SEQ ID NO: 3)
GxGxxG;
and/or
(SEQ ID NO: 4)
WxWxIP.

[0034] or a (nucleic acid) sequence encoding the same.

[0035] Accordingly, a method of identifying and/or detecting halogenating enzymes may comprise a method comprising probing or screening sequences for the presence of motifs having the sequences:

(SEQ ID 1)
Fx•Px•Sx•G
or
(SEQ ID NO: 2)
FxxPxxSxG;

[0036] and optionally:

(SEQ ID NO: 3)
GxGxxG;
and/or
(SEQ ID NO: 4)
WxWxIP.

[0037] It should be noted, that in any given halogenase (FDH) sequence, the GxGxxG consensus motif may be expected to be present near the N-terminus, for example within the first 30 amino acids. The FxxPxxSxG/Fx•Px•Sx•G consensus motif may be expected to be identified near the C-terminus, for example somewhere within the last 80 amino acids.

[0038] As stated, the methods of this invention may also be applied to nucleic acid sequences (for example genomic nucleic acid sequences and the like) in which case, the nucleic acid sequences may be probed and/or screened for nucleic acid sequences which encode the motif of SEQ ID NO: 1/2 and optionally one or both of the motif(s) provided by SEQ ID NO: 3 and 4.

[0039] Without wishing to be bound by theory, the GxGxxG motif (SEQ ID NO: 3) is located within the first 20-30 amino acids of the N-terminus. This is part of the Rossmann fold. The Rossmann fold, encoded by the GxGxxG sequence motif, is a structural motif which is found it proteins that bind dinucleotides such as FAD, NAD+ and NADP function (reported by van Berkel W J et al., J Biotechnol, 2006) (Dym O, Eisenberg D, Protein Sci, 2001). All structurally characterised flavin-dependent halogenases contain this motif both at the sequence as well as the structural level. While this motif is used for FDH identification, it is shared between flavoproteins and as a consequence, users should obtain further evidence to definitively predict FDH.

[0040] Further, (and again without wishing to be bound by theory) the WxWxIP motif has also been described as a signature motif of FDHs. It was been suggested by Dong et al. that the two tryptophans, although not directly interacting with flavin, are located near the flavin binding module and may have evolved as a steric block, keeping the substrate distant from the flavin and thereby preventing the enzyme from catalysing a monooxygenase reaction (Dong et al, Science, 2005). However, whether this motif can be used to definitively to identify FDHs is debatable, as when W272Phe and W274Phe exchanges were made on the tryptophan halogenase PrnA, no change in halogenating activity is observed (Flecks et al., Angew Chem Int Ed Engl, 2008). It has also been noted from the same study that the more extreme W272Ala mutation also made little impact on the enzyme's activity. The inventors have provided additional evidence from multiple sequence alignment of ancestors of FDHs, which shows that variations of this motif can be identified in a wide range of diverse enzymes without halogenase activity (FIG. 3); this indicates that the presence of this motif can only cautiously be utilised to imply possible halogenase activity. Furthermore, it is noted that some active WT halogenases (for example the phenol brominase Bmp5 from Pseudoateromonas spp 133) possesses a motif with the following concensus: WxYx(IP) (Agarwal, et al., Nat Chem Biol, 2015). This would support the hypothesis of the inventors that this sequence motif might perhaps be structurally important for tryptophan halogenases and to help maintain the β-sheet secondary structure, rather than being critical to catalytic function of FDHs in general and that it cannot be relied upon for definitive functional (FDH) prediction.

[0041] Accordingly, the methods of this invention, which methods exploit a motif having the consensus sequence provided as SEQ ID NO: 1/2 are more reliable and better able to definitively identify functional halogenating enzymes (halogenases) As only this identified motif is present in all sequenced and biocatalytically confirmed FDHs. The methods of this invention are more reliable than on those prior art methods which are based only on, for example, motifs having the consensus sequences identified as SEQ ID NOS: 4 and 4.

[0042] Table 2 below, provides an indication of those nucleotide codons which encode the G residues of the motif provided by SEQ ID NO: 3. Identification of a nucleotide sequence, containing these codons (in an arrangement encoding the motif of SEQ ID NO: 3 and in combination with a sequence encoding the motif of SEQ ID NO: 1/2 (and optionally a sequence encoding the motif of SEQ ID NO: 4)) identifies that nucleic acid sequence as potentially encoding a flavin-dependent halogenase enzyme.

TABLE 2

| | | | | | | |
|---|---|---|---|---|---|---|
| MOTIF | G | x | G | x | X | G |

| | | | |
|---|---|---|---|
| CODONS | GGT | GGT | GGT |
| | GGC | GGC | GGC |
| | GGA | GGA | GGA |
| | GGG | GGG | GGG |

[0043] Table 3 below, provides an indication of those nucleotide codons which encode the W, I and P residues of the motif provided by SEQ ID NO: 4. Identification of a nucleotide sequence, containing these codons (in an arrangement encoding the motif of SEQ ID NO: 4 and in combination with a sequence encoding the motif of SEQ ID NO: 1/2 (and optionally a sequence encoding the motif of SEQ ID NO 3)) identifies that nucleic acid sequence as potentially encoding a halogenating enzyme.

TABLE 3

| | | | | | | |
|---|---|---|---|---|---|---|
| MOTIF | W | x | W | x | I | P |

| | | | | |
|---|---|---|---|---|
| CODONS | TGG | TGG | ATT | CCT |
| | | | ATC | CCC |
| | | | ATA | CCA |
| | | | | CCG |

[0044] The methods described herein may be in silico methods.

[0045] The methods described herein may be combined (run in parallel, together or concurrently with) one or more prior art methods for identifying halogenating enzymes.

[0046] A sequence identified as potentially providing (or encoding) a halogenating enzyme may be synthesised, expressed and subject to an assay which determines activity (i.e. the level of halogenating activity).

[0047] An amino acid sequence identified as potentially providing a halogenating enzyme may be used as a template from which to generate a nucleic acid sequence for expression. The nucleic acid sequence may be subject to a codon optimisation procedure to ensure that it is optimised for expressing in or within the chosen expression system.

[0048] As stated, a method according to this invention may further comprise a step in which a sequence predicted to provide a halogenase enzyme (or to encode the same) is subjected to an assay to determine the level (or presence) of halogenase activity. One of skill will be aware of those assays and methods that can be used to test for halogenase activity—all of those assays and methods are to be construed as useful in a method of this disclosure. By way of non-limiting disclosure one such halogenase assay might be to monitor by (Liquid chromatography-mass spectrometry) LC-MS the conversion of substrate to its halogetated analogue. Alternatively rather than monitor halogenase activity using LC-MS, other technologies such as spectroscopic monitoring of consumption/production of substrate/co-factor/product.

[0049] By way of non-limiting disclosure, one such exemplar potential route to accessing and assaying the FDHs is described below:

[0050] Once the candidate halogenase gene has been codon optimised and cloned into the desired expression vectors, the gene can be overexpressed resulting in the overproduced enzyme containing affinity tags such as a histidine tag, which can be used for IMAC purification. Such tags can be then cleaved using a TEV protease. (It is conceivable that a cell free synthesis system, or any other suitable route, could also be utilised as an alternative to this cloning and heterologous expression route.)The pure enzyme can then be used against a library of selected compounds (10 mg/ml stock solutions in DMSO) using appropriate controls. Assays can be set in V-shaped 96 well plates. More specifically, the assays should include 10 μM of the purified halogenase enzyme, 1 μl of substrate (10 mg/ml), 10 mM halogen salt such as NaCl or NaBr or NaI, 1 μM PrnF (flavin reductase), 5 mM NADH and HEPES buffer pH=7.2 and 1 μM FAD. Reactions should be placed on ice and NADH should be added last. The plates can be sealed with gas permeable seals and the reactions should be incubated at 30° C. for 90 minutes. Equal volumes of methanol added to quench the reactions and plates can be centrifuged for 1 h. Halogenated products can be detected by both UPLC and LCMS.

[0051] Using the disclosed in silico methods, the investigators have predicted the function of 145 novel flavin dependent halogenases. In particular, the investigators have identified the 145 halogenases identified below (numbered 1-145). Each sequence is annotated with an internal designation (the “Dsg” number), an indication of the species from which the sequence was obtained and a note of the accession number (Gen Bank or otherwise) for the sequence.

1) Dsg205 from Trichoderma virens Gy29-8 GenBank: EHK23009.1
MAIPEKCTVLVVGGGPAGSYAAAALAREGIDTVILEADKFPRYHIGESMLASMRHFLRFIDVDSVFDSYG
FTKKVGAAFKLNPKKREGYTDFLAAGGPENYAWNVVRSEADQLLFQHAAKSGAKAFDGVQVKSINFIDVP
YKGPGQLPHDYPGRPVSATYVQKDDNTPREIKFDYIIDASGRVGILSTKHLKNRKYNQGLKNVATWGYWK
GAGAYGKGTPRENSPFFEALQDESGWAWLIPLHNGTASVGIVMNQKMSVERKTQAGSPDSKTFYLDCLKE
LAPDLTKLMENGELITDIKSAADYSYSASGYAIPYARIAGDAGCFIDPYFSSGVHLAFVGGLSAAATIAA
AIRGDCSEEAAADWHSKKIADAYIRFLLVVLSAYRQIRSQEEPVLSDINEDNFDRAFAFFRPVIQGIADV
DTKLSQDELRKTLEFCSNAFEPVKPEDRTAMLEKLGKDPATAYQVDLSDQQRTVVDHIRARQMMRTEDTI
NINSFGTDSINGFVPNLKRGELGLVPAKV
2) Dsg701 from Pleurotus ostreatus PC15 GenBank: KDQ27639.1
MASSTQPYTQPPKHVNVLIIGGGPAGTYAASALAREGIEVAVFEASKFPRYHIGESLIPSVRHYLRFIGA
EEKLANHGFCRKPGSAIKFNQNKQEGYTDFVALGHNNNAWNVVRSEFDQMLMNHARSSGAAVYERTKVNS
IEFSKSNPGRPTSVSWTHTPPPVPLSPPTSPQTKFKKLESNGDASEETSQVVEGVTTFDYMIDATGRAGI
MSTKYLQNRRFNESLKNVAVWGYWENVGTYGVGTKREGAPWFEALTDETGWAWFIPLHNGTTSVGIVMNQ
KSHTDRTKQQVATGDGSSTMTSRYLENILLAPGLVDLIGEGKMVDGTVKSASDFSYSAPKYAGERYRIVG
DAGAFIDPFFSSGIHLAMTSALAASASICASIRKDCTELEATEWHTKRVATSYTRFQVVVLSAYKQMRAQ
NFDVLSEIDEDNYDRAFAYLRPVIQGASEMGARLSEDELQRSLDFCLQLFNPTSPEQHERVFKQGGALAR
QLMDLSQPVMDTSLLLQQIKPLCGRRESPDTSEDSDSDVELVVKKINARRVVHPEYAINNLETEPLEGFA
VRLERGNLGLIGKH
3) Dsg407 from Cyanophage Syn10 GenBank: AGH56623.1
MKIESVAIVGGGSSGWMTAAALSKLCPQLEIALIEDPNIKTVGVGESTLGHFNKFLHLLDLKDEDWMPAC
NATYKNSIRFTNFREGKGEVFEYPFGPSLDVSFFSQTDGINTWGKLANKYPEDFPPETFARFVNSNTYLA
EHNRLTRNKDNKIPNFNFDWDTAYHIDAELFGQYLKEKIALPNGVKHIQGKVTGYQKESPNNHNFKYIIL
DQETAIFADLYIDCTGFKSLLLGEFMGEAFSPFSKKLANDKAMATRIPYENREEEMHNVTDCHAMKNGWV
WNIPLWNRIGTGYCYSSRFVSKDDAEAEFREHLGERGKDAKIFHIDIGHGKRTRAWVNNCVGIGLSYGFI
EPLESTGLLTTHENIENLVYLINQRDGYVTQAERDGFNYTCDHQIDSFSDFVAMHYAYSMRTDTPYWKWC
TQMCNYMPESMGPHRQKQSTWQDLSTDTIGLNTWHINHNGISFIIAGHGLRPQSYDKLSEVLLKRNNESD
YYYEDIRKDWLKHYESMVEYVKTLPTHYEFLRDEIYGSAE
4) Dsg5 from campylobacter phage CP21 YP_007005238.1
MKVTVIGKGTAGILTTKSLRFNFPDLEIDWIYPESNKFIGVGEALVPASSKFLKTIGVDNKMILKDFRGS
IKAGLKMIGWADKTFNLPFDNSVLLNRYMNKDLFPENFINFENVSHHFNTFSLQNLYVENINNINKTVTS
FKDIDSDLIVDCRGFQDSDDFIEPGILKNNIALTTRIPVQNFLNPYSSFFARDFGWCWTIPLQDYISIGY
VTNDSFINQASEDLKKHLQENFKTDLKDYNTIKFKTGYKKQQIAKIEGHNVFSVGLNAAFVEPLQSTGLW
LASQQIQELINYIKNGDTNWNQRFEDMYNRVYQFILNHFILCKKSNEYWDYYKNFNFKDSLFTGSNGNNV
FDGEFENFLYDSFQGKSVKYNIDKNIVGGKAALTKLKKFDELLRDYLSK
5) Dsg6 from Oidiodendron maius Zn GenBank: KIM93269.1
MSVPDTCTVLVVGGGPAGSFAAAALARDGIDVVLVDADKFPRYHIGESMLPSIRHFLKFIDCDDKWINHG
FIKKKGAAFKLNWTQPDAYTDFIAAAGPNGYAWNVIRSESDEILFKHAGECGAHIFDATKIESINFVEDA
ETKEAWDSDLPNPGRPVSAIWARKDGSTGLIAFKYLIDASGRQGISSTKYLKNRKFNQSLKNIANWGYWT
GAGVYGVGTHKEGSPYFEALKDASGWCWFIPLHDGTVSVGIVQNQEQATAKKRAQGSPSSKDFYLNSLDL
VPGVKALCGQGTLVSDIKSASDWSYTASSYAFPYARIIGDAGCFIDPFFSSGVHLAILGGLSAAVTIAGS
MRGDCDEKTAALWHSKKITESYTRFFLVVSSALKQIRSQEEPVINDIDEEGFQRAFDLFKPVIQGTVDAD
SNGRFTQADISKAMEFCFKAFTHVTPEEKDALVEKLKSYGLDARADDESTQKAIDEIEKNLTAEELQVLN
ILRSRRMVREDGYNIDSFTLDAVDGLSPNMVRGKLGLKKAESVKLNISNLYSIDYLEGKTPGVRVPNSQD
SSKESMNGHGLNEHSNGIENSMKEGITGSVNGSMRNGTPATREELEGMVKLITPLNNFGSAMDDLHRHAL
MSALYQAAESLETPFDTLMRFSNSRYQLSLIKVGYQLGVFEALVASSAALTAEELAKHTGADPKLVSRVV
RYLAANRIIVELGENLYEANKITKYMADPHMEGGMKYFHTVSSPTVHKLPEFLQENNFQNPIGEPSVWHK
SKNTAMNLFAWLKANQPETLKHLHNLRAFPKERNWLSCIPFAQFSETDRIAFVGMGRNVEHECLRLKEAH
PKLAGRIVLQHLPETPQHAPMIKDVTFISHDIFTPQPVKGAQYYYLRRTLHHWSDEQVVEILRNLVPAMA
LDSQVLIDEIVLPNTAASAPPAAHDLEMMIMFGAMERTINQWNVLLDHAGLKAVEVKTYEIAMQSSIIFA
QLK
6) Dsg8 from Candidatus pelagibacter sp. TMED197 GenBank: OUW58431.1
MSVNKITVLGGGTAGLVSALVLKARFEKLNIEVVKSDNIGIIGVGEGSTEHWKDFMEFIGVPLKELLLET
DATFKYGIMFEDWTKEPYFHNITNELHKVALGQYYAGYAYATINKLKPDEYTSGHCFNNEVLPNYIPSQF
HFNTHKLNTFLLKKCKDFGIEVHTDDITDVETDNHGIKRIRGDKGWYESDFYIDCTGFKKYLISKLGAKW
VSYKDYLPMNEAIAFPTPDTDEYTPYTLAKAMSSGWMWRIPTYGRWGNGYVFDNRYINAEQAQKECEDYL
GFKVNVAKNIKFDAGALDRPWIGNCVAMGLCASFIEPLEASSIGTSIQQSFLLMHTLINYKQTDIDQYNT
KVGHIVENIRDFVLLHYIVKRNDSKFWKELKVNLPDSLKHNLDKWSDRMPIKEDFKTDYVLFNAQNFAVL
LKELELANIDSLKREYDMLVEHNKNVVKKEVDHHIKTFKTDPMNKQCPIMGHKQYLMKLRSGKETLNQQI
DYLQNENSNT
7) Dsg9 from Eukaryarchaeota archaeon TMED97 GenBank: OUV27629.1
MKIKNVCIVGGGTTGWMMAVALNVNVPNLKVTLVESEEIPSIGVGEATIPLTAKFISSVLKFDEKEWMAA
SDATYKTAIRFNNFSKIDESFWHPFWSDDEIHYNTYDWLIKRQIEDLPTEDFYKSNFIAWYMSMDKRFQE
IKGFQHAHHMDANKFARYCQTQFKGTHINATVSSVEEKDGYIKSITVDGKKIKSDLFIDCTGFNALLIGE
TLNEPYTSYEDTLLNDSALVCRIPYGNDPFTNRQQECHPFTDCTALSSGWVFNTPVWSRTGTGYVYSSKF
QSREDAEQEFRIYLVDRFGGDRGDIAEFRHISFKTGKYERSWVNNCLALTLASGFIEPLESTGLALACWQ
IENFIDVLKDDDMSSFIRATYNDKVNMAYDEIHTFIAMHYANTKREDTEYWKHIKNNLHITQKMVDYAKN
DNVPDIWFPKKSRECVLIGLDIPSEYSKQHITWHGENFESIMKSDDNEKEFMTAGVQYLNGRKNMYQSIS
NDMPWHEDYLKEHIHVESEDS
8) Dsg10 from verrucomicrobia bacterium TMED56 GenBank: OUU35589.1
MSSKNKKLIVLGGGTAGWLTALFLNKIFPKYETTLIESKQVGIIGVGEATTPNIIYMLDYLNINLSELIS
ETKGSIKNGINFENWNGDGKKYFHGFYERLADFSVPPIFKGDCWNHYLNNLISKKLDFNTHTYITKLSYE
NKVDVHKTSYALHFDTNLLSEYLHKTGVDRGIKYVNGKLKKVHSSNLNDNINKITLTNNKSYSCDFIFDC
SGFSRLLIGKHFGVKWKSYKQHLPMKKAIPFWLKQTGNIQPYTTALAMKYGWIWKIPLQHRIGSGYIFDS
NYINDDQALKEAEKTLNTKLEVNKIIDFEAGRYESFWHENCIALGLASSFIEPLESTSIFLTIQQLFNLN
HFLGDMFKENKNSKALYNEMSNKNMDETLNFVYLHYLTKRNDSPFWKNFRKDYPPPTNFRHVLSLIRSGN
LRFLDIEEVKKTAAFPISSYLMVAYGLGLFNKKPNMIYYKNIVPTISQYLDAIKQATDQATPLNIFLDHV
NYK
9) Dsg11 Sclerotinia borealis F-4128 GenBank: ESZ98968.1
MSVPTQTSVLVVGGGPAGSYAASLLGREGVDVVLLEADKFPRYHVGESMLASMRFFLRFIDLEKTFDDHG
FEKKFGATFKITTKKEAYTDFAASLGKGGHSWNVVRSESDELLFKHAGKSGAKTFDQTKVDSLQFEPYSR
DRFTAEDHLANPGRPVSAAWSRKDGTSGTINFDYLIDGSGRNGIISTKYLKNRRFNEGLKNIAIWSYWKG
AERYKQGEDNENSPFFEALTDGSGWVWAIPLHNGTLSVGIAARQDFFFERKKTSKLEGKAFYTEYLDLAP
GIQQLLKNAEIVSELKQASDWSYSASAYAGPHFRIIGDAGCFVDPYFSSGVHLALTSGLSAAISVQAARR
GQADEWSAAKWHTTKVSEGYTRFLLLVMTVLRQLRMKEAHLITTEQEEGFDMAFKKIQPVIQGVADTETD
DARVQKNAAEAVDFSLDSFEVTPEKQRAVIDKIEKAQTAPETLEKLTPEEVHILGGIVTRTFEREKDELN
LTSFTGDVIEGLSANLVRGDLGLIRKGKKTVTPETTATMEMLAVESIKSVA
10) Dsg12 from eukyarchaeota archaeon TMED248 GenBank: OUX17232.1
MKVEEPDHFIEFENFDPYKGKIESVVIVGGGSSGWMTAAALAKLCPHLEVALVESKDIKTIGVGESTLGH
FNQYLELLDLKDEDWMPHADATYKNGIQFTNFREGKEEVFQYPFYTDYDLTYAPQGINTWAHLANMFPKD
FPPESFAEFYCANTFLCNENKQTRNFDNVVRQFDFRRHTAYHLDATKFGIYLRDHICLPNGVQHILGEIT
GFQTMYEKPNDQTISYLVMDGINAIQADLFIDCTGFKSKLLGGFQGIPFIPAENKLANDKAWAVRIPYEE
ETREKEMRNVTDCWAMKNGWTWDIPLWNRIGKGYVYSSRFCRKESAKQEFIKHLRHTVGKKRADAAELFH
IDIEHGRRQRAWVNNVVGIGLSYGFVEPLESTGLLTTHENILRLVTTLNQRDGYVTRTEKEGFNWICNYT
LDNFIDFVAMHYAFSMRTDTPYWRWCTQQNFYNPESVTQNVPVHQSIEQFVSSTLGEGWHPNMNGIPFIA
AGHGIKSSSYLKRTQYLLGELMADTDHLEDKRKKYLQWKEYIEKYVAQLPSHYEFLRDEIYGTP
11) Dsg13 from euryarchaeota archaeon TMED129 GenBank: OUV65970.1
MRVESIVIVGGGSSGWMAAAMLSKTFPKMQIGLIESEQGPIGVGESTLGHFNRFLKRLGLKDKDWMSYCN
ATYKTSIAFKNFRHGEGERFQYPFGEFDLFDYKDTLQRYFELGCKYGVDKYPPDEFANFANNQTYLADQC
KISADPIPECTYDMDRDTAYHFDAGLFGNYLRDHHCIPNGVMHLKGEIEKVMKNPDGSIDSLVTTQDGLI
KADLYDCTGFKSLLLEQHMGSEFISFKDKLFNDTALATQIPYSDRENQMETYTDCVAMNAGWVWNIPLW
HRVGTGYVYSSDYINECEAEVEFRKYLSERYTPEIAQDAKLRKINIKHGKHEKAWVKNVVGIGLAYGFLE
PLESTGLMTTHENILLLCDTLQRRQGFYSRFEQDSFNYNCDNMIESMKNFVALHYALSQRDDNKYWRDCT
NINFDIDPLWKQSTRVAHSNVVTMLDNLEDAFYNLEQHSGSIYIAAGQGYRPFSEGMFEERMSADKESDE
WSSILEEIHTKYQQDRKIMMEWVDKLPSHYEYLRDNIYDLQEEETVG
12) Dsg14 from Gaeumannomyces tritici R3-111a-1 GenBank: XP_009229206.1
MASVPQSCTVLVVGGGPGGSYASAALAREGIDVVLLESEKFPRYHIGESMLPSMRHFLKFIDGYEKFNAH
GFNIKKGGAFRLNWARPESYTDFVAAGGPEGYAWNVVRSEADEIMFKHAASCGVKTFDATKVTSVEFSPP
SSPEEELGRPVSATWSRKDGSSGAISFRYLVDASGRAGLLSTKYMKNRHYNQGLKNVASWAYWKGGGTHA
VGTHKEGAPYFEALKDASGWVWFIPLHNGTHSVGVVQNQDIATEKKRAMAEPSARGLYEQSLDLVPGIRA
LLSKAEMVSDVKSASDWSYSASRYALPGARIVGDAGSFIDPFFSSGVHLALAGGLAAATTIAAVLRGDCD
EATAASWAPPTPTLRVAA
13) from Armillaria ostroyae GenBank: SJL9408.1
MHDNRLWVFLEHWCLLFWPACRSRYTSYLSPPIPYITRKNLAISIQQLIVNRLWFQLNAMIPTKTTVLVV
GGGPGGSYAAAVLARENVDVVILEADKFPRYHVGESQLAALRHFLRFIDLEKEFDAYGFQRKVGGAFKLN
RHKREGYSDFISHDPKNYSWHVIRSESDELMLRYASRVGAKVFEETKVTDIEFGTPVEGQETRPVAALWK
GKNGDTGRIQFDYIIDASGRTGILSTQYLKNREFNNKLMNVAFWGYWTGAGRYMAGTPREDSIFVEALTD
ETGWVWFIPLHDGTTSVGVVMDQEKSNLMRAAVKEARGDSSSSAHYLRQLELAPAIRELMVDAKLIKKPD
APLVSSASDYSYAARYHAGPGYRIIGDAGAFIDPFFSSGVHLAVSGGLSAAATICAVMKGECSELDAARW
HTTKLNSSYTRFMLVVLSAYHQIRSQDSPILSAQEDDNFDLAFEFFRPIIQGNTESGGKFADDNLGKTID
FLGKHVFEPSYPEQRAELVALYGDQLDAVPKARVPGDNEAKAETKTILKHMAVQKLIRMEDVAHIGNYVS
DVFEGHRLRLKRGELGLDKAA
14) Dsg16 from Gymnopus luxurians FD-317 M1 GenBank: KIK62692.1
MASTHTSTIPATATVLIIGGGPGGSYAAAVLAREGINVLLLEADKFPRYHVGESQLASLRHFLRFIDLEK
EFENHGFTQKHGAAFKLDKHKREGYTDFVFDDPKNYSWNTVRSESDELMLRHAARSGATVIEETRVMEJE
WDDARPMAATWKNTQSGQMGQVKFDYLIDASGRAGICSVKYLKNRHYNPDFKNVAFWTYWSGCGEYKPGT
SRAGSPYFEALSDESGWAWFIPLHIGTSVGVVVKQELSDEKRATAKTRGLDSSLYGHYMRLLDSAPNIKA
MIANAAIIKNNNEIVVRTASDYSYHSDSYAGPHYRIIGDAGAFIDPYLSSGVHLAISSGLSAAASICSSL
KGECSEDDAIRFHNAKIDASYTRFVLIIKSVYEHIRSQKATTLSSATEDNFDDAFLMFRPVIQGRIDSSL
SLSEEDKTRLVHFYSRHAFEPSMPEERHNLLKEFGDPVKSFNNADDIHSKAILRSMAVRKLLSVDETNHI
DNYVADVVEGFRLRLERGNIGIEKCR
15) Dsg17 from Mycena chlorophos GenBank: GAT58269.1
MSVPASAKVLVIGGGPGGSYAATCLARENVDVVLLEADKFPRYHVGESQLASLRYFLRFVDLEQQFEDFG
FQKKPGAAFKLNQNKREGYTDFTAKDPANYSWNLVRSLSDELMLRHAAKSGANVIEETKVTEVEFKGEGD
AAQPVAAVWKNKAGETGKITFDFVIDASGRNGIISSKYKKTRVFNDNLLNVASWGYWKGTGRYAVGTSRE
NGPFFESLTDESGWAWFIPLHDGTTSVGVVQNQDISNKKRAEAKERGEDSSTSAHYHRELDLAPAVRVLM
GEATMVKKPDAPMISAASDYSYHASAYAGPHYRLVGDAACFIDPFFSSGVHLAISGGLSAAASVCAVING
QATDAEAQVYHHQKVDAAYKRFLLVVLSAYQQIRVQNVPVYSNENNFDEAFHFFRPIIQGNTDTGKQLAG
DDLKKTVEFLGTHAFEPSLPEERTQIFAKYGEEVDKLPPSMTDDNVEDTRARNILQGIAIRKLMRTEDTL
HINNETVDILGGLRMVMKRGSLGLEKAEVMA
16) Dsg18 from Pseudoaltermonas byunsanensis GenBank: OHU95107.1
MTATLINQAYNKHHKLVDIRLIESPDVDIIGVGEATVPAIKDFLQAAGIDEAEFMNYCNATFKNGIMFEN
WRQPKHGKMHRYVHPFDFERVEKRLDIATSWVLSERQRPFDESVSLASTLIQHNLTPKTRTTKPYHGIVH
YSYHMDARLFGQFLRQRAMAAGVTRIEAHVESVNTDNGQISSIATTQGLFESDLFIDCTGFRALLISALE
EKSSNWRSYQDELMCDSAVTVQIPHSEEHIPRSYTVAHALSCGWAWSIDLQNRTGNGYVYSSKYCSKEQA
ELEFRNYLKLDNNVALNHIDMSVGRRKRHWIGNCVAIGLAGGFIEPLESTGLHLIFLAARFLVLHNNFQY
CEANIAGFNQTMNATYDELKDFIVTHYVLSDRDDSDFWRDISKTLDACPQLAQKLDLWQSKVCEFFDVSN
STSHMFTDTSYRYILFGMDHIPQIKIPYFDGEFTDVFEFVKSRQQKAVAIALNHVDYFSYDVKGQVTVKL
SQ
17) Dsg19 from Gammaproteobacteria bacterium MedPE GenBank: OIQ47327.1
MPQKAIKTLVIVGGGSAGWMSASFLNHIFNLKEKQIDIKLIESSEVETIGVGEATIHSIRFFLSTIGISE
REFMQKTQAIFKHGILFKDWSGQEKDEYYHPFEHPKVNDGIDVVRHWVNLNSNTEKSSRFDFSVSAQSLC
ASQNKSPKSQGNKDFEGYFPYGYHLDAAKFAHFLRDFSLTKGVKRIEGHVQEVILGTDGDIQRLILKNGL
QIDGDFFIDCTGFSSVLMKAMGNKEWVDYSDSLLCDRAVTCQLEHNKENQEHRPYTIATAQKSGWIWDID
LQSRRGMGYVYSSSFCSTEQAEIDLSVYANTAREKLSFKHLQMKTGRMEKIWFKNCLAIGLSAGFIEPLE
STGIYFIDMGIRFFGDYITSGNVNTLLIDKYNTVMGQLMDQSKDFISLHYTLSKRNDSQFWRAYQHDVPI
SETLSANLTLWKHKIPTAIDFSAQITQFTSANYTYILYGMKYFPEPAVTSNLFTSEDRSMKNIEYVKSRS
NQMNNKLPTMSQFLKNI
18) Dsg20 from Asticcacaulis sp. AC466 GenBank: ESQ83834.1
MFMNSVQQQEIVILGGGAAGWIAAALLARKTDRSQTRVTLVESEEIGIIGVGEATVPVLAHCNALLGIDE
YDFIRNTQGTFKLGIEFCDWGVAGNRHFHAFSDYGHQVDGVSTHHYWLRLRQSGDAHPIDDYSFAYAVAK
NNNFAPTDPQNPRYHHAYHFDAALYARYLRDVATGQGVQRIEGKMTHFDLESASGNITAIHLANGSRVPG
DLFLDCTGFASELLGKALETPFVDWSRWLLCNSAMAVPSKRTGAPMPFTRSTAHAGGWRWTIPLQHRCGH
GMVYNSDLWSDDAARDALTGNVDGELLAEPRVFRFTSGHRKQFWNRNCVGIGFASSFLEPLESTGLQLIV
QGVLKLLQFFPQRIIDPVLRDEYNRISTREIERIRDFIIAHYYLSRRPEPLWAACRNIEVPDSLRHKLEV
WNASGQIALGDLESYMEPSWLAILLGNGVVPARYAVAADLYPLEQIRKGMKLRREEIVRSAQAVTSHQDF
IDQYCKAP
19) Dsg21 from Marinomonas mediterranea WP_013663195.1
MKKRIAIIGAGLSGIAAIKQLTDEGHHVVCYEKAESFGGVFAAKKIYEDLHLTISNYFMAYSDFLPTEQS
LKFWSKQEYVQYLKRYLAHFDIEKHIVYNHKVVNAEQNGDKWTVKVQSGSGEETESEFDMVVVCSGHFQE
PKTPDLEGLSDFMGDIIHSNDYRDKMAFKGKRVMCVGLGESSADITSEISEVAEKCILSLRRYPAVAPRY
MAFQEDPYFTIDTSWLTSRIVNKLPFSYHRGITKNIFHKYVNSRNLHLRIRGEWLHKSGPSIHQAVTKNE
RLFKPIAEGKVLPNIGGIERFEGNTVIFKDGTHEEIDAIVFCTGYKLSFPFLQHKIECMRDLYKQIFIPS
VGSSLAFVGFVRPQQGGIPVIAEMQSRYLAQLASGVKSLPSLEKQKEVIMEDANHWETEYHITPHVASLV
NYCHYMDSMARLVGCMPKTPSLLKDPLLRVKLLHNPQFAAQYRLEGPHPMSESSRDFLVNFPNISTWPRI
IHFECALAMQKLLSFLSMDNLRELKK
20) Dsg22 from Armillaria solidipes PBK71279.1
MIPTKTAVLVVGGGPGGSYAAAVLARENVDVVVLEADKFPRYHVGESQLAALRHFLRFIDLEKEFDAYGF
QRKVGGAFKLNRHKREGYSDFISHDPKNYSWHVIRSESDELMLRYASRVGAKVFEETKVTDIEFGTPVEG
QETRPVAALWKGKDGDTGRIQFDYIIDASGRTGILSTQYLKNREFNNKLMNVAFWGYWTGAGRYMAGTPR
EDSIFVEALTDETGWVWFIPLHDGTTSVGVVMDQEKSNLMRATVKEARGDSSSSAHYLRQLELAPAIREL
MVDAKLIKKPDAPLVSSASDYSYAARYHAGPGYRIIGDAGAFIDPFFSSGVHLAVSGGLSAAATICAVMK
GECSELDAARWHTTKLHSSYTRFMLVVLSAYHQIRSQDSPILSAQEDDNFDLAFEFFRPIIQGNTESGSK
FADDNLGKTIEFLGKHVFEPSYPEQRAELVALYGDQLDAVPKARVPGDNEAKAETKTILKHMAVQKLIRM
EDVAHIRNYVSDVFEGHRLRLKRGELGLDKAA
21) Dsg23 from Colletotrichum higginsianum CCF36327.1
MSPAIPERCTVLVIGGGPGGSYAASALAREGIDVVVLEGDKFPRYHIGESMLASMRHMLRFIDLEAKFDS
YGFIKKPGASFKLNKDKRPGYTDFLAAGGPNNYAWNVVRSEADQLMFHHAGECGAKIFDAVKIKSIRFED
ATTVPEGEPNLNPGRPVAAVYEVAETKETGEIAFDYVVDASGRVGLLSTKYMKNRRYNQGLKNVANWGYW
EGCNKFSPGTPRENSPFFEALTDESGWAWFIPLHNGKASVGVVMNQKLAAHKKQQGGFNSTEFYHESLKL
APELLSVLVGDGKFVSDVKSASDYSYSASSYAFPNARIVGDAGCFIDPFFSSGVHIALTGALSAATTIAA
SIRGDSEEATAAEWHSKKVAAAYTRFLLVVLSAYKQMRFQGDPVLSDFDEDNFDRAFSFFRPIIQGTADA
ANGNLSQDELNKTLEFCAHAFEPVNPEANQEKVMKAVSAAPAGSDYNPDLSVEEQNAVNHIRARKMMRTE
DTFNINTFGTDSIVGYVPNLVRGSLGLKKAETNGVVAA
22) Dsg24 from Suillus luteus UH-Slu-Lm8-n1 KIK37366.1
MAGQTLPTSTQILIVGGGPAGSYAAAALAREGFEVTLLEAVQFPRYHIGESLLPSVRHFLAFIGAEESIM
NYGFTVKPGAAVKLNQFKREGYTDFVALNPNNGSWNVIRSEFDDLLFRHASNSGATVFDNTRVTEFQFEG
ERPVSASWRNAITGVEGRISFSYLVDASGRNGIMSTKYLKNRRYNKALNNVACWGYWDGTGSYMPGTTRE
NAIFVEALKDESGWAWFIPLHDGSTSVGIVMDSESSNRKKKASRAASGGSGSNILAHYKEELLSRAPGVL
KLIGTATLRNDGTPEAVKSASDFSYSAPSYAGDHFRLAGDSGAFIDPFFSSGVHLAFTGGLSAALTIAAS
IRGFCSEEDAQRWHTSKIATSYTRFLLVVLGTYKQIRNQAMPVMSDVDEDNFDRAFDLIRPVIQGTADVG
KALTEDELQKTMDFCRHLFAPTNPEMHSAVKARLDPSLTSPDAPVMTESDIDSLLGDADEEAKLVLSEIN
ARKPIHTMYNPTENFGVEAHFGFKAVLERGKLGLAST
22) Dsg25 from Streptomyces glaucescens WP_078957599.1
MSMRKSVCVIGAGPSGLVAIKELLDEGHSVTCFEHSAELGGVFRAEVGADEAGAYDSTMLTISNYMMTFS
SFPPPQGQDRRYWSAGEYRQYLLDFAEKFGLGPAIRYRTDVLSVSRNDSGGYTVEVAPVDDPEGRAAHQF
DAVVISTGTHRVPNYIDLPGQEEFAGEIVHSAHYRNADRFRGKRVLCVGIGETAADVVNEIAQVAASCTL
SVRRYQPIVERYPGDRPFTNDAYTSHLLHSVPLAAAGPLMHLGMKRNRTRGKTAAARAVAAWNANNPDFF
HHFLTKNDAFVHRIVDGTLTVDASGIQRLGKDYVVFRSGRRETIDTVMLNTGYTEDFSILKDVDVTDVRR
LYKHMIHPELGTGVVFIGWARPAAGGVPACSEMQSRYFALLCSGKKKLPDRVRLQGLIERQAAYENEVFH
GNPDLRTLVHYNHYMIDFAKVIGCSPWRPSLLLDPRLALRLWCGSQTPHVYRLSGPHSDRRTARRTVMSL
PPAFTPAQIALTTAVSAVSRVLIRLGLMKADPVY
23) Dsg26 from Moritella viscosa WP_082293722.1
MSKRIIMQTQQKNICVIGAGCSGLVAIKELLDEGHQVTCFETLDKPGGNFYCSDNVEISGSYDSTMLTIS
NYMMAYSSYPPALSEQRKFWSAREYQEYLLDFTKHFSLDQHITYENAVNNVKKLDNGKFHVDVRSTHDET
QVSSFTFDAIAVCTGSSRVPKYIDIKGLETFKGDVYHSAFYKNSKPYTGRSALCIGMGETGVDVASETAG
VAGKCMLSLRQRQPSVERFPLAKEHPSDAYTSHFLYAMPVSAGNARMKLQFKAMKKFGKEEKTRAFADWN
LKAGNYFNYFNLKSDVFVDRIVDNKMAVNTSGIDYLGEDYVAFNDGHKESIDMIMLNTGYTDKFDFLEDI
KLPDMRQLYKHMIHPDLGCDIVFIGWARPAVGGVPACSEMQSRYFALLCSGKKQLPEMHKLKQLIAQQAF
YEDEVYFKNRNVRSLVHYTGYMADFSKVIGCSPWRLSTFLNPILTYRLWVGSQMPSFYRLYGPHSNYDKA
KKSIFNVPIAFNLIEAAVLTTYTLLTRGLATLGIIKADPKY
24) Dsg27 from Chaetomium globosum CBS 148.51 XP_001225800.1
msIPQSCTVLVVGGGPAGSFASAALAREGIDVVMLEADKHPRYHIGESMLPSMRHFLEFIDCYEQFNAHG
FIKKNGAAFRLNKTQPEAFTDFIAAGGPNGHAWNVVRSEADELLFNHAASCGVRAFQTTKVDAVQFEESD
GETAGPGRPVSASWKRKDGTTGTIAFKYMVDASGRYGLLSTKYLKNRKFNQSLKNIANWAYWKGGGIYAE
GTHKAGSPFFEALQDASGWCWFIPLHDGTHSIGIVQNQEMATEKKRAAGSPSTKEFYTQSLDLAPGIKAL
LSKAEVVSDVKSASDWSYSADTYAFPYARIAGDAGAFIDPFFSSGVHLAVLGGVSAAVTIAASIRGDCDE
KAAASWHSKKTAESYTRFFLVVSSALKQIRMQEDPVIQDLDEEGFQRAFDLFRPVIQGTVDAHHNGKLTQ
SETSNTVEFCFKAFTHVTPEQKDAVVNKLRKLSANAEAGDEETIDNALGEIEKSLTPDELQVLNILRGRR
MIREDGYNMDSFTLDTIDGLAPRMERGKLGLAKSQAARLSKAHLYSADYLEGKRPGVRVVQPAKSMNGAN
GHSNGEANGHTNAANGTNGVNGANGTNGHTKEHANGHENGSGMNGAAKATFNAANGAGLFASPINGQAAQ
LDDVGRHALMNTLHEAAENLETPFDLVMRLGNSARLLTYIRVAHTLNLFATLSNASPTPVPLTTLTSTGP
APGAAPTFIRRVLVFLAANRLIGEAGPDLFVATKATHSLALPGVAGGATFYQGVIAPMTQYLPESPLAKC
GYVQRAGEPAVFDSWSAGVEGGGRGLWPYLKGRPEMLGAFQELMALDRGGGDWVGCVDFEGVDSPSLVMG
GEGGGGSERVVFVDVGGNVGHQARRLVERHPRLAGRVVVQDLPETVAAAPAAKGVAFLAHDFFEPQPVRG
ARYYYLRSVLHNWGDAQAVEILKNVAAAMVEDSRVLIDEMVVPDKSADVLVAGQDLNMMLLFGGMERRTD
DWAALLDRVGLKIVEVKMYGPVTKNSIIVAMLK
25) Dsg28 from Pseudomassariella vexata GenBank: ORY71356.1
MIATIPEKCTVLVVGGGPAGSYAASALAREGIDVVLLEADKFPRYHIGESMLPSMRHFLKFIDAYEKWDA
YGFNIKKGGAFRLNWSRPETYTDFVAAGGPGGYAWNVVRSEADELLFKHAAECGVKTFDETKVASIEFAE
PASSDSQNFGRPVSATWTRKDGTTGTISLDYVVDASGRAGLISTKYLKNRSYNQGSKNIASWGYWKGGGV
HGVGTFKEGAPYFEALKDGSGWVWFIPLHNGKHSVGIVQNQEMATKKKREMAEPSSAGFYKQSLELVPGI
KELLANAELVSDIKSASDWSYSASSYAFPGVRIAGDAGSFIDPFFSSGVHLALSGGLSSATTIAAAIRGD
CNEEKAASWHDKKTAESYTRFLVVVSSALKQIRSQDQPIINDFDEQSFERAFDLFRPIIQGQVDADARGK
LSQAEISKTVEFCFKAFAHVSFEEKEALIAKLKQLGLDGDAYDESNRAALDAIEKKLTAEEQSILKTLKG
RRMVRPEDSLNIDNFTLDSIDGLAPRLERGRLGLQGAKKAQVKFTAHDSLSFLNGEARAANKLQNGHAAA
NGTGHANDHANGHASDHANGHANGHSDIHGVEKSLVDLVMSEERLPSASLDESSRHRLMSSLHESAEELE
TPYDTMLRFVNAGRQVALIKIGGDLGIFKSLADSKTPLCSTQLAEGTGADPTLFSRIMRYLVANRLVAEV
SPDHYVARKTTHALADPRIESPMRFFHAVSNPAFQALPDFLRETGYQNQTQRQALQKGLGTELGLFPWLK
QRPDLLRDFQSLMGVPKEGNCLDVIPLDDSVCSGHKGPVFVDIGGNTGQQAGGLVAKYPALAGRVVVQDR
QETVNSATGVKGVQFMAHDFFSPQPVKGAKYYYLRAVLHNWDDDKAAQILANIVPAMSADSLVLIDEVIM
PDMGAHVWPAGLDLQMYTLFGASERTAKQWDALLQRAGLQPVSVKKYAPVMGSSVIFAAPK
26) Dsg29 from Ophiocordyceps australis GenBank: PHH66063.1
MASIPEKCTVLVIGGGPAGSFASSALAREGINVVLLEAEKFPRYHIGESMLPSMRHFLKFIDCYEKWDAH
GFNIKNGGAFRLNWSRPETYTDFIAAGGSQGYAWNVVRSEADELLFKHAGECGVKTFDETKVASIEFAPR
EADAPEKQPFGRPVSATWTRKDGSSGVIAVDYIVDASGRNGLISTRYLKNRAYNQGLKNIANWGYWKGGG
VHGVGTFKEGAPYFEALKDASGWVWFIPLHNGTHSVGIVQNQEMATAKKRKMAEPSSKGFYLETLELVPG
IKELLAKAELVSEIKSASDWSYSASNYAFPGVRIAGDAGSFIDPFFSSGVHLALSGGLSAATTICAALRG
DCDEKFAASWHDKKTAESYTRFLVVVSSALKQIRAQDQPVINDFDEDTFERAFDLFRPIIQGQADSDFKG
KLSQAEISKTVEFCFKAFAHVSYEDKEALVKKLKDLGLDGDAHDEKNRQALDELEKKLTPEERSILTTLK
GRRMVRPEDSLNIDNFTLDSIDGFAPRLERGRLGLASAEKAKVKYTTHDSLSYLNGEARAANKVPANGAV
VKNGCNGANGHHAANGVNGSANKNMAALVADDENLPQTTLDEASRHKLMSSLHESAEQLETPYDTMLRFL
NAGRQVALIKLGGDMQIFKSLVDSKTPLSSAQLAKPTAADPRLVARIVRYLAANRLVAQVAPDQFTAQQT
THTLADPRIQGPMRFFHAVSNPAFHALPDFLQETGYQNKSETCAFQRGLKTDLGLFPWLKQHPDLLKDFQ
SLMGVPKEGNCLNVISLDASVSSEHRGPILVDIGGNTGQQAGNILAKHPELAGRVVVQDREEAVKNASDI
KGCQFMAHDFFKPQPIKGAKYYYLRAILHNWDDEKAAQILANIVPAMTADSLVLIDETVIADEGAHVWPA
GLDLQMFTLFGATERTTTQWDAILDRAGLRPVAVKRYAPVMGSSVIFAAPK
27) Dsg30 from Colletotrichum sublineola KDN62803.1
MASVPQSCTVLVVGGGPAGSYASAALAREGIDVVLLEAEKFPRYHIGESMLPSMRHFLKFIDGYEKWDAH
GFNVKKGGAFRLNWSRPETYTDFIAAGGPDGYAWNVIRSEADELLFKHAAECGVKTFDATKVTSIEFSSP
GEGSEADGKKLGRPVSATWSRKDGSSGTISFDYLVDASGRAGLISTKYLKNRSFNQGLKNIASWAYWKGG
GVHGVGTHKEGAPYFEALKDASGWVWFIPLHNGTHSVGIVQNQEMATKKKREMDEPSSLGFYKQSLDLVP
GIKELLSKAEMVSEVKSASDWSYSASSYAFPGVRIAGDAGSFIDPFFSSGVHLALSGGLSAAASIAAAIR
GDCDEETAASWHDKKTAESYTRFLVVVSSALKQIRSSDQPVLHDFDEESFERAFDLFRPGTFPVARGMKK
FNQHSLTLYRPAVIQGQVDADTKGGLTQAEISKTLEFCFKAFAHVSFEEKEALVNKLKELGLDGDAYDET
NRQALDELEQKLTPEEQAILKTLKGRRMVRPEDSLNIDNFTLDSIDGLAPRLERGKLGLAPAKKAQVKYT
THDKLSYLNGEAGAANKLESNGHHKPQGNPTVTNGHGATNGHSATNGHSATNGHSATNGHSMTNGHNGVT
EHTSYNATHVADLVASGNESGKITLDERTRHSLMSSLHEKAEELETPFDTLTRLVDAGRQVALVKLGSDL
GIFKSLAESTTPLSSGQLAEYKEADPLLVSRIVRYLVANRFVGEVAPDRYVSRKATHALADERIASSLRF
FHAVSNPSFQALPDYLRETGYRNRTAGSALQKGLAAEQGMFPWLKQHPDVLADFQNLMGIPKESNGWDVI
PLDMSLSANHQGPVLVDIGGSTGQQAKLLVAQHPELAGKVVVQDREETIKGAPAIQGVDLMAHDFFKPQP
VKGAKYYYLRAILHNWDEDQAVQILANIVPAMSNDSLVLIDEVVISEKGAHVWPAGLDLQMLTLFGASER
TGPQWDTLLDRAGLKPVSVRKYAPVMESCVIFASRK
28) Dsg31 from Pseudogymnoascus sp. VKM F-4246 KFY11174.1
MSVPQKCTVLVVGGGPSGSFAASTLAREGVDVVVLESENFPRYHVGESLLPSMKHFLKFIDLYDQWNAHG
FIKKNGAGFKLNHAHGAAYTDFLAAGGPHGHAWNVVRSEADELLFRHAGVSGAKIFEATKVNALQFEPYN
GPTMPDVPNPGRPVSATWSSKDGSSGTIAFDYLVDASGRFGLVCNKYLKNRKFNQSLKNIANWGYWKGGG
IYGVGTHKEGCPYFEALTDGSGWCWFIPLHDGTHSVGIVQNQEMATAKKREQGSPSTKEFYKTSLDLVPG
IKELLSNGELTSEIKAASDWSYTASTYSLPYVRISGDAACFIDPFFSSGVHLGVLGGLSAAVTIMASIKG
ECDELAAATWHTKKVTESYTRFFLVVSSALKQIRSQTAPVIQDIDEDGFQRAFDLFRPIIQGTADADSGG
KLTKADISQTMDFCVKAFTHVSEEQQGALMKKLKAHGLDERLDDEAAKKVIDELEKDLTEEEQQVLNVLR
SRRMIHEDSFNLDSFTLDSIDGMAPNLVRGKLGLIKQETAKISKATLYSTTFLEDMTPGTRTHRAEQTIN
EHQYSGRDTYTNARSSVLASAANR
29) Dsg32 from Daldinia sp EC12 GenBank: OTB14557.1
MNVPQKCTILVIGGGPSGSYTAAALAREGLDVVVLEADTFPRYHVGESMLPSVRPFLKFIDGYDKWIARG
FRIKNGGAFKLDHSRPDTYTDFVASGGPEGYAWNVIRSESDELLFNHASSCGAKTFDSTKVNDIQFDPAN
VAPNFDGQIPGRPVSATWTRKDGSSGIIRFEYLVDASGRHGILSTRYLKNRKFNQGLKNIANWGYWKGGG
VYGTGTYKEGSPYFEALTDASGWCWFIPLHDGTHSVGIVQNQEIATAKKREAGCESTKEFYLQSLNLLPG
TKELLSKGELISDIRSASDWSYSASSYAFPYARIVGDAGSFIDPFFSSGVHLALNGGLSAAVTISASIRG
DCDEETAASWHSKKITDSYTRFLLVVLSATKQIRHQNRPVIHDFDEDSFERAFELFRPVIQGTVDADVIV
KPTQEEISKTVEFCFRSLADIPPEHKDALIEKLKSLGVEGEADDESTLRAIEEIEKNLTLEESQILNILR
GRRMLRNEDSISLVNFTLDSIDGLAPRLEQGNLGLVKAAPIKASKAQLYSASFLRGGRPDIRTQRGDKVS
RELGNDSAVSN
30) Dsg33 from Hypoxylon sp. CO27-5 GenBank: OTA94904.1
msIPQNCTILVIGGGPAGSYVAAALAREGLDVVVLEAEQFPRYHIGESMLPSMRHFLKFIDGYDKWNDHG
FRVKNGGAFKLDPGLPDTYTDFVASGGPEGYAWNAIRSEADQLLFEHANSCGAKTFDATKVTSIDFEPYV
ATDATSKFEGPNPGRPISATWKHNDGDSGTISFDYLVDASGRRGILSTQYLKNRKYNEGLKNIANWGYWK
DGGVYGPGTYKEGSPYFEALNDASGWCWFIPLHDGTHSVGIVQNQDSATEKKKAGDCPPTKEFYLQSLEL
APGIRELLSKGELVSDVKSASDWSYSASSYAFPYARIAGDAGSFIDPFFSSGVHLAFNGGLSAAVTIAAA
IRGDCDENTAASWHTKRIAESYTRFLLIILSSTKQIRNQNKPIIHDFDEESFERAFDLFRPIIQGTVDAD
VKRELTQDEISKAVEFCFRSFADFSSEKKDALIEKLKGLGLEDNEDVEKSATAIEEMQKSLTPDESRILD
ILRGRRMIRAEDSINLVNFTLDSIDGLVPNLERGKLGLIQATPVKTNNASLYSVKYLRGGRPDIRTQRGD
KTSKAPEETTDEGSIPK
31) Dsg34 from Coprinopsis cinereal okayama7#130 XP_001838319.1
MGRTSPSSLRTQVLVIGGGPAGAYAASVLAREGFQTTVLEATKFPRYHIGESMLPSVTSFFEFIGLDEKL
RNHGFCSKPGAAVKFNQRKKEGYTDFLKNNSEGTWNVVRSEFDEMLLRHAGESGATVLEEHKVIEIKFED
VSGKSRPYSAVFTRPSGERSEIHFDYLIDASGRNGIMSTKYLRNRKMNSSLHNIACWGYWEGGYGKYMPG
TRRENAPWFEALTDESGWAWYIPLHNGTVSVGVVMDQDVSSSKKAKAREASATGEHTLCDHYLQQLELVP
GLKALLGTATLVSNHVKSASDYSYSAERYAGDRFRIIGDASAFIDPLFSSGVHLALLGGLTAASTVAASV
RGHCSEEEAAEYHHVKIGAAYTRFFLVVMSAYRQIRSQNVDILSDVDEDNFDRAFDIIRPVIQGTADVGR
TLSESELQKTLDFCKDVWAPVDPEMHERVASRYGSELLSPAAPIFKPEDLDQIVDPNDEDAVDVFKRANA
RKIVDPMFKGISSLESEPVKGFITCLQRGSLGLIYIASAA
32) Dsg35 from Sistotremastrum niveocremeum HHB9708 GenBank: KZS96629.1
MPVPTNPQNSIPSRTKVLVIGGGPGGSYAACALAREGIDVTVLEASRFPRYHIGESMLPSVRPFMQFIGC
EQKIIDHGFTLKPGAAVKFNQWKQEGYTDFVALDPDNAAWNVIRSEFDNIIFEHAAESGANVFQQVKVTS
IDFAPDSPPPSPPATLTGPRPVRAHYTRTHSGGATTTGTIEFDYLIDASGRNGMMSTKYLQNRKMNESLK
NVACWGYWRGGAMYMPGTTRENAPWFEALTDESGWAWYIPLHNGTVSVGIVMDQSISNAKKAKSKAAAAP
KEFTLTDHYHEQLQAFAPHLCKLLTKAHLVTDDGPAVKAASDYSYAATSYAGDHFRLVGDAAATLAFIDP
FFSSGVHLAFTGGMSAAASVASSIRGQTTEAEAAGYHDAKVGVSYTRFLLVVMGAYKQIRAQSQPVLADV
DENNFDRAFSIIRPVIQGTADAGKRLTENELQKTMDFCKHIFSPTDPEMHEAVGARVDPSLFSPEGPVMT
PDDLDRVLDPNDDEARAVLQEVNARKPVHIMYNATGNFDMEDVNGWKVTVKRGNLGLRRA
33) Dsg36 from Scytonema hofmanni WP_051502977.1
MSTLPKFTQVLVIGGGPAGSTTATLLAREGFDVTLMEKAVGPRYHIGESLLPSSMEILELTNAKEKVEAY
GFQRKEGAYFEWGTDKWSFDFGQLNGKQKYSYHVRRADFDKLLLDHATSQGVKVFEGTEVRELSFNGARP
QSAIWSQNSGDNSSGEISFDILVDASGRAGVMATRYLKNRQQNQVFQNIAVWGYWKGAGKVTEAPAGAFV
GGSTEDGWLWGIPLHDGTLSVGVVMHKESYKARRSTSLEEFYLGAIAESPLMTKLLTQAELVSSVQAEQD
YSYAAENFCGSGYFLIGDAACFLDPLLSTGVHLANLSALLASASITSLLRNEVSENQAISFYEKSYRQAY
LRFLSLVSFFYDKKRGTDAYYEEAQELAHNDYRDSAPNTAFVNLVSGMEDLTEAQNGIDNLVIEKISQRA
ARSLSLEQVQEDLDGEKMDTQIMNVMEGMYTFSKDLSVEAAIDGFYVVTRPRLGLGRVSEKVEESAQKRL
ADSNAPSPSIR
34) Dsg37 from Tolyprothrix sp. NIES-4075 WP_089131087.1
MSTLPKFTQVLVIGGGPAGSTTATLLAREGFDVTLMEKAVGPRYHIGESLLPSSMEILELTNAKEKVEAY
GFQRKEGAYFEWGTDKWSFDFGQLNGKQKYSYHVRRADFDKLLLDHATSQGVKVFEGTEVRELSFNGARP
QSAIWSQNSGDNSSGEISFDILVDASGRAGVMATRYLKNRQQNQVFQNIAVWGYWKGAGKLTEAPAGAFV
GGSTEDGWLWGIPLHDGTLSVGVVMHKESYKARRSTSLEEFYLGAIAESPLMTKLLTQAELVSSVQAEQD
YSYAAENFCGPGYFLIGDAACFLDPLLSTGVHLANLSALLASASITSLLRNEVSENQAISFYEKSYRQAY
LRFLSLVSFFYDKKRGTEAYYEEAQELAHNDYRDSAPNTAFVNLVSGMEDLTEAQNGIDNLVIEKISQRA
ARSLSLEQVQEDLDGEKMDTQIMNVMEGMYTFSKDLSVEAAIDGFYVVTRPRLGLGRVSEKVEESAQKRL
ADSNAPSPSIR
35) Dsg38 from Fischerella sp. NIES-4106 WP_096680287.1
MSTLPKSTQVLVIGGGPAGSTAATLLAREGFDVTLVEKAVGPRYHIGESLLPSSMEVLELIGVKEKVDAY
GFQRKDGAYLEWGSESWSFEFTKLNGKQKHSYQVRRADFDKLLLDHASSQGVKVFEGIEVRELSFNGTRP
RNAIWSQTSGGNSSGELSFNFVIDASGRAGLMATRYLKNRRQNNVFQNVAVWGYWKGASKLTKGPEGAIG
VGSIPEGWLWAIPLHDGTLSVGVVLHREAYKAQRSASLKEFYLNAIAECPLVAELLTQAELVSSVEAEQD
FSYTSESLCGPGYFLVGDAACFLDPLLSTGVHLANFSGMLASASIASVLRNEVTEDQALSFYEKSYRQAY
LRFLMLVSFLYDQKRGQKAYYQEAQELTHNDYKADAANAAFVNIVSGMEDLTEVQDGIDYQVTKKISQRV
AKSISIDDFRKNYDPEVLDPQIMQAMEGTLSFSKDLSVEAAIDGFYIVTQPRLGLSRVQHKAEELLSSEL
FHS
36) Dsg39 from Mastigocladopsis repens WP_017317771.1
MSTLPKSTQVLVVGGGPGGSTAATLLARQGFDVTLVEKEITPRYHIGESLLPSALEIFELLGIRDKVESY
GCQQKEGAYFVWGPRQWGIEFQRLLNKYTFQVRRGRFDKLLLEHASEQGVKVFDGIEIRKLSFDGERPIS
ATWSSGGMNGSSGEIAFDFLIDASGRSGLMSTQYLQNRRYHKEFQNIAIWGYWKNVDFSKIWPENGTVSA
RTEDGSGWIWAIPLSDDTLSTGLVLNKEIYKQRKSQASLEGIYAAGIADCPYVSDLVKTAELASPIKVEQ
DYSYVADKFAGPGYFMLGDAACFLDPLLSTGVHLAFFGGMLSAASIGSVLRNEVTQEQAYSFYDKTLRFH
YLTLLVFVSSFYHITGNPEDMDMDADPSAGPRRFIAEVEDLQKVEPQMRQLVSEHMVELLTKAEEGVRLM
VAEELEGTAKLSGELDPKHQAVFLQLWRGVFGYLPDFDGLRLKTQTNLRLVSVSEDDAAALTLDTVLDEK
YYAQQEADMALTK
37) Dsg40 from Moorea producens WP_070392566.1
MTLNNSDTFKMFDAIVIGGGPAGATCAYKIAANGHSVLLLEKAKFPRFHIGESMVPYLYKLFEMIDISDK
IKEGGFVQKNGVEFLTGTTGDLRRQNFGNVAKGQTPFSYNLNRARFDKILLDHAQDTGAQVLQEADVKKL
IFDGERLAGVEYQYQGCRHEARANFVVDASGRAGLIAKHFNLRKMNNKLQNVAVFQHYKDVVAENNPGVE
GDVLFSCHEDGWLWGIPIETNVMSVGAVMPLSILKQSNPEEIFKAHCDRSPRIKSAIKGATPLFNKPKVE
LDFCYYSEQFTGPGYFIVGDAACFVDPVFSGGVFLSMLCGLKAAEAIHEIFDGKDDLEACQDFENLCKTG
YDSYFRVVYSYYYEFNRDMNKMGLNLPGGFRFVLQTFAGDFWAERDQPVLSYLRSKKEWDTFEQPFERIY
DCPIYPDTHYKAADPASFTPPEDFLESINTQTQTETQKAAVL
38) Dsg41 from Calothrix sp. PCC7507 WP_015131184.1
MNIPQQCDVVIIGGGPAGSTAATILARKGYKVVLLEREKFPRERVGESMLPFCYELFRELGVLAQMEKRF
VRKPGVRFINSDGSASTYWCFNHVIKDESYLSFQVNRSEFDTILLENSRKHGAEVREETRVDVCSLEVEG
STDKVEVQAISRNGERLSLQTRFVIDASGRSGFIASSKGWRKGHKGFARTALWTHWKGIKSLKGGLEEGS
SIILYLGGEKRGWAWVFPLGIDWVTVGVVMDTAYLNHKRQELQASSIKDWCTELYQQELYSSEFIRELLA
QARISMPVQVEGDYSYYSENKFSTKYAMVGDANRFLDPIFSSGVFLSMKSSFLVANAVDKMLLSNQANDM
SYLEEAYAKINGAYDFVYRLISLFYQPHALSWAEAGATFNSVSQIDYKRHEVAMGAGHYMLAGDFFENHE
KYHKFLDMMENPRFFEGYKNLVVDREEYQTESCGAERSIIFP
39) Dsg42 from Fischerella thermalis WP_102149226.1
MNHSYYDVVVIGGGPAGSTLATLLVRKKYQVLVLEREKFPRFHVGESLLPATQLIWEKLGIAEPLQHLGN
TFKYGTEIRMGLNPQQSEYEYSRQEFYKFPTQRLQQQPYAYQVERSEFDLFLLNHAREEGATVFEEAVVK
EVLWEDDTATGIHWKSKDNIEYTTKAKFIADCSGRYGLITKSRKFLIPNKTIKTSAVFGHFKHVTRASGI
QQGYFNGYVIENGWIWFIPLASDIMSVGVVMNEPGTSWWKQKSPEEILLTYIQQYKFIRERFEQAEQFSK
VRMLRDLSYASKRSVGDGWILVGDANFFVDPLFSSGVHIAFRSAEKAADAIDEFLKNNRDRKSLQQYEKW
SQKEHFHVSTTMALMYKMLKYRISMQLLIKLTGKYSNHWDNLLLRRLVAWGSGYYEEFHWTLYCSWLFCF
LLIGIGKVCEKFLGISGWSTQPEFCSKSPLTFPKSVESLKNKHPEI
40) Dsg43 from Nostocales cyanobacterium HT-58-2 WP_087539197.1
MKDKKQYDVIIIGGGPAGTTCATMLSREGHEVLLLEKYKFPRFHIGESITAFGANAFKKLGIYGELKQIG
YVKKKGAEFIFQEKSYSAYFNKSFQNESDELPWAFQMARSKLDLLLLENARKSGATILEQHVVKRVLFNG
ERAIGIEYKDLSKDAINPPLQYAYAKWIVDASGQAGMINKQVENNCYNDFLLNKKLAIFNHWEGDFEITN
TDEDVNFKFCIHENRRDWAWYIPIDKNIVSIGVVLSEESIKNRTEGLEGVFYKYAEQLPFISDFLKNPTL
KPIDKFRSARDYSYRCKQYYGDGWVLVGDSAGFIDPIFSTGLQIAFSSAFMLVDALHEVLSQKSPNYSKL
KAYNRNVNKLYKINSMFVYLYYLSGLEFEKLWSISHMWKYLKWSGLKYPVLFFWYALQIRIASKKQARIW
GDEVLFGIIKSQNPLANLLLALSENYERLQNRRAKNVISRNQFLEMEV
41) Dsg44 from Nostoc sp. Peltigera membranacea cyanobiont' 213
WP_094331718.1
MNIPQQCDVVIIGGGPAGSTSATFLSQKGYDVVLLERHKHPRHHIGENTIPQFWKYTDLAQVSDKIAAEG
FTQKAGGTTFWNGRIRQVDFKDFGYSRQALHVERDRFDLILLENAREKGVQIFEEVSVLSVDLQDGQQEQ
SLTYRLLKDKSLGKITCRFIVDASGQNAVIAKQMGIRTIDKDFRFMSLWGYFKNSKYIGLNGKAHSVENL
RTILPTTFICSFAETGNWGWSWHIPLRESTSVGLILPLEFMKTVQLNGGSWESYFRQKCCEIPILEDLLA
NAQFCEGSFAKIQDYSYRSTQLAGPGFFLIGDAAGFIDPIFSIGIVLGMYSAYTATWAIDRSFKNPSSLV
HNQALFSSQLQGRLEVARSLALPHYQSGDRACDLAKTTIQMERALEQELMATWSTMTTRPENFQAIASSL
KGREINSNKFRVIEEMI
42) Dsg45 from Cyanothece sp. PCC 7822 WP_013322009.1
MNYETATIGGGPAGASLATYLARAGKSVAIFEKSDFPRFHIGESLLPATMPILQDLGVYERMRSTFLNKP
GGCWYYDDTPVMSDFAKCRETASFKDFRHAFMVERGEFDRILLDNARDHGVRVFQHHLVREAIWEGERMT
GLQVKDLQTMEGKSIRTEMVFDCSGYRSVIASQRNLRKPNRLKKMAIFAHYRAEALEERLKQGWFVGQMF
YDGWLWLIPIDKDRISIGVVTTLDNYKKASISPEQFLDHYIRTLSLTRKGLGKNIERVSDIYLYGNLGYS
SERIFGDRWALVGDAAVFIDPCYSSGVHLAMDSAREIARVYLEHGYDARSLQNALSKYEKRLRQHEELVL
MLVDSFYMASRNKFLRFLVKNLSKISSLNQKFVHFTGGDLADDPGYIKMTYYTHLAISALANVFQRQPSA
APEKGKSAVLIK
43) Dsg46 from Planktothrix agardhii WP_051340019.1
MNIPQRCDVVIIGGGPAGSMAATFLSQKGYDVVLLERCKYPRHHIGENIIPQFWKYTDLAQVSDKIAAEG
FIQKAGGTSFWNGLIRQIDFKDFGYSRQALHVERDRFDLILLENAQNKGVQVFEEVSVLSVDLQDGQQEP
SLTYRLLKDKSSSKIACRFIVDASGQNAVIAKQLGIRTIDADFRFMSLWGYFKNSKYIGLDGKAHSVENL
RTILPTTFICSFAETGNWGWSWHIPLRESTSVGLVLPLEFMKKVQLNGGSWESYFRQKCYEIPILEDLLA
NAQFCEGSFAKIQDYSYRSTQLAGPGFFLIGDAAGFIDPIFSLGIVLGIELLQNNFMVLW
44) Dsg47 Dsg47 from Trichoderma gamsii PNP44317.1
MAIPEKCTVLVVGGGPAGSYAASALAREGIDTVILEADKFPRYHIGESMLASMRHFLRFIDVDSEFDNYG
FTKKVGAAFKLNPRKREGYTDFLAAGGPENYAWNVVRSEADHLLFKHAAKSGAKAFDGVQIKKINFVDAP
YKGSGELPHEYPGRPVSASYLRKDDNTTHEIKFDYIVDASGRVGLLSTKHLKNRRYNQGLKNVANWGYWK
GAGAYGKGTPRENSPFFEALQDESGWAWLIPLHNGTVSVGVVMNQKMSAERKSQMGSPDSKTFYLNCLKE
LAPDLSNLMENGELITDIKSASDYSYSASGYAIPYARIAGDAGCFIDPYFSSGVHLAFVGGLSAATTIAA
SIRGDCSEEDAADWHSKKVADSYVRFLLVVLSAYRQIRAQNEPVLSDFDEDNFDRAFAFFRPVIQGTADV
DSKLSQAELSKTLEFCSNAFEPVKPEDRSSMLEKLGQNPDTAYQVDLSPQQRTVVDHIRARQMMRTEDTM
NINSFGTDAINGFIPNLKKGGLGLVRA
45) Dsg48 from Halobellus rufus WP_049984930.1
MAGSTISMILAKNDLDVLLIEAKKHPRFAIGEAMLPLSAVWMWIVGEYFDVPEIQHLSDANRIVDNVTES
CGVKHSVGFAYHERGQPFSGEHAHQLVPPEMPFYKESHLLREHVDHYLVESAGSYGVEYVDETPITDVEI
DDDEVTVTTDRGTTTGAVFVDATGGNSILAEKRGYRDETPDLETDTRAIFAHVEGLEPFDELIDEEDRPG
QTNRLHDGTLHHVFEGGWLWVIPFDNFDRSTETKASVGLMLDRNTRPRDESLSAEEEFHEIISAYPDVER
HLGPVEPVMPWIRTGRLQRSASESSGHRHLLTNHTYGFVDPLYSQGMVHTFESVFQSAKLLLEAFEVGDF
SAERFAPIDDLHRRQLETADLLVSNAYTSMDEFDLWNAWTQLILVESVFPDLYIQRHCLKYLSSGDPAEL
DRLLRETRPGDDAPFAPEKDALLDRSSAVLDAYTAGEISAGTAAESLFDAMKRADWLPRSVYDWGNEDER
HIDFADPAVTGELLAWGRTDAPAHIREGLFDFEMPEMP
46) Dsg49 from Diploscapter pachys GenBank: PAV66111.1
MTPPPSSIAILGGGTAGWMAACLMAKAWPQARITVIESPDIGIVGVGEGSTPQLKALFDALGLAEADWMP
AADATYKAGIAFHGWSDDTPAYFHPFAGQIDLHTQGAFFASTRARRHGADVPAHPDRFFLNARLAEAGRA
PIAPAHFPFRIGYGYHFDAHKVGHVLRDAAVARGVVHLPRRVHDVVVDTAGQVVALTLDEGDALHAELFV
DASGFASAIAQQALGVPFRSFANTLFADRAVVMPTPRQAALPVQTKATALSAGWAWGIPLTSRTGNGYVY
ASRYLSSDAAETELRRHLGLLDADVAARHLSMKVGRVETSWTANCLAIGLAQGFIEPLEATALHIVQATI
EGFIGAYQAGSRDAFNAAIARRYDGIRDYIVAHYRLNRRSGPFWRDVAANDDLSDDLKAIMTAWFTGGDV
AAVVEGRGLAGYYAPMSWEVLLAGYGTFPDATRLRTAPPVADLAAIDTLLSGCLLNFPDHQAALDGHRRM
P
47) Dsg50 from Ricinus communis GenBank: EEF25242.1
FAPRDHNAAPGSPLADIAYAYHFDATLYARYLRELAERRGVQRIEGKIVGVQQRADDGHIASVTLESGQV
VDGELFIDCSGFRGLLIEQTLKTGYVEWSHWLPCDSALAVPSASVDPVTPYTRASAQRAGWQWRIPLQHR
TGNGYVYSSKYISDDEAAATLLANLDSEALAEPRQLRFTTGMRRKFWHKNVVALGLASGFLEPLESTSIY
LAQSGITRLLSMFPQRDVHPLLVERYNQESAFEYERVRDFLILHYHATERNDTPFWDYCRTMAIPDSLRE
ATDLFRSDGRYFRNGDDFFALPSWVQVMLGQGIVPRGYHPIVDEMPESVLIEQVGGMERMLADAVAAMPT
HQEWINRYWKAPAL
48) Dsg51 from Fomitiporia mediterranea MF3/22 GenBank: XP_007270069.1
MPSEIPGTCTVLVIGGGPAGAFAAAALAREGIDVILLEADNFPRYHIGESMLPAMRHMFRFIDVDSAFDS
FGFIIKNGAAFKLNQHNREGYTDFVAAGGPNNYSWNVLRSESDNILFRHAAASGAKVFDGVKVTELSFKP
DDASHLGRPIRASYVFKSNRETGDIAFDYIVDATGRAGLMCTKYLKNRTYNQSLKNIAMWAYWKGTGVYG
IGTPREGAPLAEALIDESGWAWFIPLHIGTSVGIVMDQELTNKKKRAHDPPLSGLEFYLEQLRLAPTIMS
LLGSANPTNIDDEQMVRSASDYSYSSSCYSGPGFRIAGDAGAFIDPFFSSGVHLALIGGLTAALTICASI
RGDCTESEAADWHSKKIGSSFTWFLMVVLGAYKQMKSQRDAVLTDINEDNFDRAFSFIRPIIQGSIDVDE
QLSVSDLSKVIDICVRAFEPAQTESREAVLAKLKDECFATQVYENSQYLCIGNVGENVLSDDEKRVLAYI
NAREVLGARDRALTMNAFVTDVIGGRRPRLKQGELGLEIATNRMS
49) Dsg52 from Dyella thiooxydans GenBank: AND70239.1
MAQRPEFPAGLRPFFAIGQVSEDDGTAAGEEPAMARINKVLVVGGGTAGWLVACYLARAMRSSDPSGIQV
HLVEAENIGLLGVGEATFPSIRGTLAAIGLDERHFLDGAHATYKQGIHYRHWVRPPGTPGRDAFFHPFNQ
PSQRPGGPELLPYWLLGEAPAELPFAEAVTLQSRVVEGGRAPKRPQDPDYQGPLNHAFHFDAACFARVLA
EHGTQTLGVHRHVATVERAELDERGAIARLITTELGPMTADLYVDCTGLRSHLAGGTMQSPFLSRADVLF
ADRAMAMQVPYDRPDAPIPSYTIATAHEAGWTWDIGLQQRRGVGYVYSSRHTDDARAEQVLRGYLGNAAE
GLTPLRIRFETGYRPEHWRHNCVAVGLAGGFVEPLESTGIALVELGAYLLTHALPADLDDLPRIARHYNT
MMVARYERIIDFIKLHYCLSQRRDTPFWRDNTAPGSIPQTLQDKLALWRYRPPHRLDFVGDLEMFLVASW
QYVLYGMEFRTDLTPMRRSYTQVAEARQEFATIQQVAARAQDDLPDHRAFVERMVREHRERAGRAHAAA
50) Dsg53 from Sphingomonas parapaucimobilis NBRC15100 GenBank:
GAM02388.1
MTNDVVRVVIVGGGTAGWMAGAALTRLLSGQCSVRLIESEAIGVVGVGEATLPHIRSFNERLGIPEAEFM
ARTRATFKLGIEFRDWSRIGDSYIHPFGTFGRGTGAIDFHHYWSRLVREGRDLPPLDQLSYACTLAREAR
FEHPDQGRGGLSSTFGYAYQFDALLFAPYLRSLAEEAGAIRTEGLVVDVERDSQNGLIRAVVLDSGERVE
GDLFIDCSGFRSLLLGQTLDEPFEDWSKWLPTDRAVAMPCRTETAVTPYTSAIAMPAGWRWRIPLQHRTG
NGYVYASDFVSDADAAHALEKAVEGEKLAEPRLLRFKAGRRRRSWVGNCVAIGLASGFLEPLESTSIYLV
QQAITALIELFPGRRMEASDRDEFNRVIDLEYDRIRDFLILHYHATSRDDSPFWNYVRTMPIPDSLGEKL
ELWRRRGRVVKYREGVFLDASWIAVYLGQGIVPEGWDPRADVAGTGDLVQAVAALRSEIAAEVAIRPDHR
AFLERYCPMVAA
51) Dsg54 from Aspergillus arachidicola GenBank: PIG8503.1
MTNVPEKCQVLVIGGGPAGSYSASALAREGIDVVLLEAEKFPRYHIGESMLPSMRHFLKFIDAYDKWDAH
GFNVKNGGAFRLNWSRPETYTDFISAGGPGGYAWNVIRSEADELLFKHAAECGVKTFDETKVASIEFAPS
EDANPLGRPVSATWNRKDGTSGTVAMDYIVDASGRNGLISTKYLKNRTFNKGLRNVASWGYWKGGGVHGV
GTHKEGAPYFEALKDASGWVWFIPLHNGTHSVGVVQNQEMATEKKRKMAEPSSKGFYLESLEFVPGIKEL
LSNAELISEVKSASDWSYSASSYAFPGVRIAGDAGSFIDPFFSSGVHLALSGGLSAATTIAAAIRGDCDE
TVAASWHDKKTSESYTRFLLVVSSALKQIRSQDEPVISDFDEQSFERAFDLFRPIIQGQADADAKGKLTQ
AEMSKTVEFCFRAFAHVSFEEKEALVKKLKSLGHDGDAYDEANRKALDELEKHLTPEEQAILKTLKGRRM
VRPEDSLNIDNFTLDSIDGLAPRLEKGNLGLSPAKKAEVKFTTHDALSFLNGEARAAKKTLSDGQSQTNG
NHMCKDHDQTNGHTETNGHIESNGNAATNGHTEANGQSHANGHTNGNHMTNGHDEVNGHNNVEVRTVKSC
MADLIAAEKSSFQTPVEEATRHRLISSLHQSAEDLETPFDTVVRLVDAGRQTAMVCIGGDLGIFKSLVES
KRPLSSEELAKATMADPLLVSRIMRYMVASRLVGETGPDQYVASKKTYVFADPRIEHPIRFFHAFSNPAF
HALPEFLKETGYQNEPKGSAFQKALSTDLEPYPWLKQHPEVLKNFQAAMRLTRDANGVDMMPLDESVSSG
HDGAMFVDIGGNTGHQAAEVLSKYPELAGRVVVQDRGEVIKCAPDIKGIQWMEHDFFQTQPVKGAKYYYL
RAILHNWDDKNTVQILSNIVPAMSADSLVAIDEVVVPEENAHVWPAGLDLQMYSLFSTTERTASQWDTIL
DKAGLRAVAVKKYAPVMQSSVIFAAAK
52) Dsg55 from Albimonas pacifica GenBank: WP_092860541.1
MTAMSGGPDPLRVLVAGGGSAGWMAAATLDAALNRGGARAVAITVVESPDTPRIGVGEATIPTIRRTLRR
LRIPEAEFLAAAEATFKQAIVFADWSGPGSGFAHPFHTRPGDGAEQAAARFLRSDGRTPFADLVTPQPAL
AAAFRGPRRAGDADYVGPLPYAYHMDAEAFAELLAARAVTRGVARVSAHLRPPERAPDRPLEAVEATDGR
RFAADLFVDATGFRRLLIGQGGFLDQSRHLICDAAVALRAPCAPGPTRPFTVAAAREGGWTWDIPLRTRR
GRGYVHATAHLAPEAAEDALRAETPGAGEARRLRFQVGRLAQPWQANVVAVGLAAGFVEPLESTGLHLAD
LAAGLLAENAPLAGPNPGLARAYNALLAAAHDEVVDFVNLHYAASPRRDTPFWRDAADPARRTDRVAHLL
ELWEARPPVAADFPSSLQAFNHRNWEFILHGLGWRPRALGPAGGPPLAPDPELAAEARRLAAELPGHDAL
LAALAPR
53) Dsg56 from Cylindrospermum stagnate WP_085960655.1
MHVEKTIHNVVVLGGGSAGFLSALALKVKMPSLNVVVVHSKTIPVIGVGEATTAWIPWFLHTYLGLNRQQ
FYEETQPIWKLGIKFIWGNSHQSHFNYPFVTHLADKLSVLDKSTAYYCLDSTRESSIYSLLMEQYKSPCF
RKENGDFVFDERFGYHIENASFVSYLERRAAELDIKIIDQPVVNIQVAENGYIHQLKLDDGTTLAGDLFV
DCSGFRSTLLGEILQEPFCSFSSSLFNDSAVTGTWMRDDVIYPFTTAETMQAGWCWRIDLPEQVNRGYVY
SSAFISDDDALAEMKRQNPLMGDDHHSVVRFKSGRHQRFWVNNVVGVGNASGFVEPLESTGLHMIGETIK
CVCDVLIDSDQQPTPGLINLANQAIAEKWDDIRDFLSIHFKFNRRVTSDFWQHCWQQTDIGEAEAVVDFF
QNNGPSPIGQLLLRKNSVFKYNGYLNLLMGQQVATKYQGNNEILDLDNWRQVKNYFLKNCDNALPIHEAT
QVVKERKCQWLSS
54) Dsg57 from Actinocynnema sp. ALI-1.44 GenBank: ONI77922.1
MDHKELAAGMGAGHRTELHAVLESLGESEAAAVRSWLGGGETPDPLALLGELAPVPSDLSRPDDADPQAI
RRIGVIGGGTAGYLTALALKAKRPWLDVTLVESRQIPIIGVGEATVSYLTLFLHHYLDIDAEELYRCVQP
TWKLGIRFDWGPHPDGFMGPFDWSADSVGLLGALAATGNINGSTLGSAMMVADRTAVFDVDGRPVSLMKY
LPFAYHLDNGRFVSFLTDLARRRGVHHVEATLADVVVSGAEWVDHVRTDDGRELRFDMYVDCTGFRSRLL
GQALGTPFTSFASSLFTDSAVTGNIDHGGHLRPYTQATTMNAGWCWRIPTRESDHRGYVYSSAAISDQEA
ADEFARRYPGVDGLRQVRFRSGRHEKSWRGNVMGIGNAYGFVEPLESTGLLMIAVAVHSLVSTLPGSWSE
PSPRELVNAGLGQQWNAIRWLLAIHYRFNTRLDTPFWKEVRATADVSGFDTLLEVYAGGAPLSQRHVLVQ
DVLNRIAPTFFGLFGIDYLLLGQQVPTRRMPLAEPIERWHARKHAADALVAAALPHREALDAFDAHPELN
KQLLEDTDSWAGRSIAKRVGLL
55) Dsg58 from Trichophyton violaceuym OAL70258.1
MVGLVAIISVWWCVRPKPNKIPIIGDAKNQNFMAALEEGSRKQYPESCFRIPTRDIPTIIVPRKCLSTIA
YAPEHRLSLGREVYERLMGRYTKMVKSDHLAEFVRGGLSKQLGANISLLQEDAIWTISSQIGNCPEWKPL
QLFPAMVKLVPLHIGRTFINSPLSREQEWIDLTLEYAISTVTIAAKMSNTHWMLRPFKALFLPEIGEMSQ
QFKQASKLLSPVLNARLLGDAPGTKDLMQWMIDNYPGQSNNLTLHTRLQLEAVQAATYNLAFQLIHFFFD
ILAHPEYIEPLRIEIQTVFDSCGRTWTPAALAELRKCDSFLKESQRLNPIGIVSVSRFALSKFDLPDGTT
VPAGISVSAPAMTVNTDPSLWECPTQFDGYRFEKLRQIKGNEYKYQFSSISASELNWGYGTHSCPGRHFA
SNQVKVIIAELLMKYDFRFEENIQDNQTPKRPANNFDGVRIMPNPEARIMIRSREVGAICSVPEERDRGK
GDRIYRASNHSRVNGTNKSFNFTEEANMSIPASCTALVVGGGPAGSYAASALVREGVDVVLLEADVFPRY
HIGESMLPSIRHFLRFIDLDSKFDSYGFVQKNGAAFKLNSKPEAYTDFVAAGGPGSYAWNVIRSEADHLI
FKHAGENGAKTFDGVKVNAINFEPLSEENSDPVSTDLGRPVSATWTRKADKSSGVIKFEYLVDATGRAGL
VSTKYMKNRTYNQGLKNVATWGYWKGASSYGIGTPREGDPYFEAIADGSGWVWLIPLHDGTTSIGVVMNQ
AMATTKKREAGSSSQQFYLDNVKQIPGIWQLLDNAELVSDLKSASDWSYSASSYASPYLRIAGDAGCFID
PFFSSGVHLAFASGLSAALSIRAAQRGDCDEMAAAEWHSKKVAEGYTRFLLVVMSALKQISDRDEPVLTD
WDEESFNRAFDLFRPIIQGTVDVDKTLTQAEIAQTINFCVNAFQNAGREEQDALMNKIKSVSETKNGEET
DVVKKLKESLSADERRTLNTIQARQIIRSEDTMNIDNFTVDVIDGMVPNLKRGSLGLLRYVPKVKAGQQE
DELRAKLGLPEKQESIFSY
56) Dsg59 from Piloderma croceum F1598 GenBank: KIM79851.1
MSRSAVPKKAQILVLGGGPAGSYTACMLALEGFDVVLLEAAKFPRYHIGESMLPSCPQFLKLIDLEETVE
NFGFCNKPGAALKLVGEKKEAYTDFIRTHPENRSWNVTRADFDEILLRHAEKVGVKVFEETRAFSIKFVN
DNPKGRPLAVKWQNIIDRNVSGTVSFEYLVDATGRDGIMAQKYLKHRKVNTSLRNVACWGYWKGAGVYGV
GTSRENAPWFEAHTEESGWNWFIPLHNGMTSVGVVINEDAGNQRKLAAKRANGGVASTLKRHYLDCLQLS
PGLIDLLGDAKLLEDGPYPVVQSASDFSYNAPTYSGDHYRLIGDAAAFIDPFFSSGVHLALTGGLAAAVS
IASSIRGEYSETEGCKYHDAKIGVAYTRFLVVVLSAYKQMRAQNRSVLSDFDEDNFDRAFDIIRPVIQGD
ADVGRRMSEDELQKLIALCGSALLPVDPEVYARVVSRLDTKLVDPRGAIVTPEEIDLLVPNDLEARLVLK
EINARKSTGGLFLTISDSFEEVTAGFSARVHRGNIGLISHAPKANSTSGFSIQVGKARPSHLPHLLLLFF
GVVLALLFHQYGTFGVV
58) Dsg60 from Cellulophaga sp. W5C WP_077399145.1
MTIHFIEYEESKICQSIIKQLQEKYNFSCCLTKDLGCVKNNDLIIWFVQNENLESVLNTCANIRKHLPDT
TILFVSAFECDKILIGPIYSPNNTSGLDSALFFLYQEKCEDINSKLKLKLPLFKDILGEEFYIKRIHKLT
QKLAEKINEFKNVSQNKNSINKIEIYNIKESNFDERFVYPILEIKEDFYEKKKNSQLIQDINFINASKKD
FRFKLLNKSTLNKTVAIVGGGTAGYLSAISLKTKHPELEVTLIESEKIPIIGVGEATTPDLVDFLFKDLK
LDKLDFYKKVEPTWKLGIKFYWGESGDYTFNYPFGEHDLVSGYINGNIDHGSLTSILMSQDSSFILRKNE
KDFYSLTNPRRIGYAFHLENRKFVTYLKNKAIELGVVRLQNTIDKVILNDSHNQVSSLITSDGKKLQCDY
YLDCSGFKSLLIDKLDSQYFSYNDNLITDTAISFNVNHKGEIKPYTYAESMKNGWCWNIPLRDSDHRGYV
YSSKLSSENDIIDELKLKYPNLTDYKVIRFKSGRHNSFIKGNVAAIGNSYGFVEPLESTGIHMITEHIKI
LTKSFDALINDRTGTLKGHLNRHIANKWDYLKWFLSIHYKYNKKFDSPFWEFCRNEIDVSKYQHILDLYK
SDGPLQMLNNSLSDSLRFDFVDSLFGLKGVDNILLGQGVIPNSIDDIQNVGHELWKYNVNTWMNLSKRTI
PLKEDIEILVQNPNLI
59) Dsg61 from Hydnomerulius pinastri MD-312 GenBank: KIJ65857.1
MSATIPTHTQVLVIGGGPAGSYAASALASEGLQVVILEGAEFPRYHIGESLIPSVRHYLRYIGAEQKLAD
HGFKHKPGAAIKFNQFKREGYTDFVALGHSNNSWNVTRSDFDKMLLDHARESGAWVHEKTKVQSVRFSSS
EPSRPVAAEWSQSSGTGQEGVISFDFLVDATGRTGLMSNKYLENRHYNESLRNIALWGYWKGVGTYGGGT
TREGAPWFEALTDDSGWAWSIPLHDGTTSIGVVMNQKLYNERTKALPGSSTATRYQSFLSLAPHVFNLIG
DGVLVAKPSVDGPPGSLDPLVRSASDFSYSAPEYGGNSFRIIGDAGAFIDPLFSSGVHLAMTSALSAAAS
ICASVRGDCSEDVASAWHSRRFSLSYTRFQMVVLSAYKQIWATNLDVLNDVDEDDYDRAFASIRPVIQGA
SDMGTRLSEGELQNALEFCSKFFNPTSQERRGYYTLKHGLPKELFDITAPLVDPKNMDAALRSAGINLSE
DGGSAQEDEVKLVMEQVNARRVLHREYAVNNLEAEEINGYAVRLERGSLGLVKVV
60) Dsg62 from Trichophyton soudanense CBS 452.61 EZF74478.1
msIPASCTALVVGGGPAGSYAASALVREGVDVVLLEADVFPRYHIGESMLPSIRHFLRFIDLDSKFDSYG
FVQKNGAAFKLNSKPEAYTDFIAAGGPGSYAWNVIRSEADHLIFKHAGENGAKTLDGVKVNAINFEPLSE
ENSDPVSTDLGRPVSATWTRKADKSSGVIKFEYLVDATGRAGLVSTKYMKNRTYNQGLKNVAIWGYWKGA
SSYGIGTPREGDPYFEAIADGSGWVWLIPLHDGTTSIGVVMNQAMATTKKREAGSSSQQFYLDNVKQIPG
IWQLLDNAELVSDLKSASDWSYSASSYASPYLRIAGDAGCFIDPFFSSGVHLAFASGLSAALSIRAAQRG
DCDEMAAAEWHSKKVAEGYTRFLLVVMSALKQISDRDEPVLTDWDEESFNRAFDLFRPIIQGTVDVDKTL
TQAEIAQTINFCVNAFQNAGREEQDALMNKIKSVSETKNGEETDVVKKLKESLSADERRTLNTIQARQII
RSEDTMNIDNFTVDVIDGMVPNLKRGSLGLLRYVPKVKAGQQEDELRAKLGLPEKQESIFSY
61) Dsg63 from Talaromyces cellulolyticus AMD-G3 GenBank: GAM38376.1
msIPTKTTVLVIGGGPGGSYTASALAREGIDTVLLEADVFPRYHVGESMVASIRHFLRFIDLDTTFNNHG
FIKKTGAAFKLNNQKTAYTDFIVAAGPDSYAWNVIRSEADDLIFRHAGKSGAKIFDGVKVTSLEFVPNKE
ADLPTDGTADPGRPVSATWTAKDGRTGSISFDYLVDASGRVGIVTTKYLKTRSYNQDLKNVASWGYWRGA
ISYGVGTPKEGQPFFEALQDGSGWVWFIPLHDGTVSVGVVMNQEMSTQKKKESTTDNGRDFYIESIKDAH
GVTHLLQNAKLDTEVKHASDWSYSASEYASPYVRVVGDAGCFIDPYFSSGVHLAFSGALSAAVSISASIR
GHCDETQAWKWHSTGVRDRFTRFLLVVMSATKQIRARDAPIMNNQGEDGFDDAFTIIRPVIQGISDVTGK
TTHDEVSRAVDFTTEAVAKTKPDDSANSSSQAGPQFTDTIQQGSLTKDEAKVLHMVKNVFKDFFVADVYN
GYRAKLERGSLGLEKVNTEALLVGEKLSGTKTEVKEVEV
62) Dsg64 from Moniliophthora roreri KTB28644.1
MPTGCSNSSPPRSIDILVIGEKLTIPQLSPGGPAGSYAASVLAQEGLNVALCEASKFPRYHIGESLLPSV
RNFLRFVGAEGKVAKHGFTRKPGGAIKFNHQKREAYTDFVAIGQENSSWNVVRSEFDELLLNHARSCGVS
VFEQTKITSLTFAQEDPSRPVSASWISSESSGEHDGAPGERSGTICFKYLIDASGRAGIMSTKYLKNRHF
NQSLKNIAVWGYWTGVSSYGLGTPRAGAPYFEALNDESGWAWFIPINNGTTSVGIVRNQQMHVEQLRCPV
SGEIPFDGSAVPNPSQSRMVDQYAFNLSLAPGVVKLITEHGKLEEGSVKSATDFSYSASVYGGNGYRIVG
DAGAFIDPFFSSGVHLALTSALSAATSICASIRGDCSEEEAAVWHTRRFSTSYTRFQIVVLSAYKQLRSQ
QLNILSDIDEDNFDRAFNFLRPVIQGNGDMGVRLHGRELEDCLDFCVKLFNPTDPEEHDRLRNDKNFDKA
LLDLSAPISNLSAITPGSAEAKEILEKVNSRKVLNAEYTTDSFVSESLGGYSVRFEKGALGLKKGA
63) Dsg65 from Nostoc calcicola WP_073644584.1
MEKTIHNVVVFGGGSAGFLSALALKVKMPALNVVVVHSTTIPIIGVGEATTAWIPWFLHKYLELNREQFY
EETQPIWKLGIKFIWGDSSQSHFNYPFVTHLADKLSVLSKSTAYYCLDSTTESSLYSLLMEQCKSPCFRR
ENGDFVVDERFGYHIENVSFVSYLERRATEIDIKIIDRPVVNIEVAENGYIRQLKFDDGTMLAGDLFVDC
SGFRSALLGEILQEPFCSFASSLFCDSAVTGTWMRDDAINPFTTAQTMQSGWCWQIDLPDKVNRGYVYSS
AFINDDDALQEMKRHNPLMSDRHSIVRFKSGRHQRFWVNNVVAVGNASGFVEPLESTGLHMIGETIKCVC
DVLIDSDQQPTPALINLANRAIAQKWDDIRDFLSIHFKFNHRVESEFWQHCWHQTDIGDAEAIVDFFQSN
GPSSLGQILLRPNSVFGYNGYLNLLMGQQVATKYQSHNDILDLDRWRQIQNYFTKQCANALSIHEAIQVV
KERKCQWLTS
64) Dsg66 from Massilia sp. Root335 GenBank: KQV33239.1
MSYQSIAIVGGGTAGWLAACYLQRALNGNPAHPVRITLIESPDVAAIGVGEATVPTLRMMLRTIGIPEAA
LFASAEATLKNGIRFVGWHDGTDSFDHPFDMPIVADGYSTMTHWLNLKQRGLTRQPFGEAGVVQPALMDA
LRSPKLMSSAPYEAPVPYAYHLDAVLLARLLRDTAKERGVVHVEGTVEQVDVDETGIRAVCLADGTRHAA
DLFVDCTGFASLLLGKTLDVPFHSYADTLLCDRALACPVAHEASDAPLRSHTVATAQDAGWTWDIELQTR
KGTGYVYSSRHCSDDEALATLRRYNAGRTELAEPRLLRMRVGRHTRMWEKNCLALGLAGGFIEPLESTGI
YLIEYALQMWLDYLPTPAGAAPMRDRYNMLMAEHYDELHDFVLAHYVLSARRDTAFWRACTEEVKVSDRL
AALLALWKHKLPGTADIDARRQVLFGPHNWFFILAGQRCLPEHGIGQMPYIAPERSQAALARIAEIRKAA
VSQSPSMREYAQKIRAAAANAPRR
65) Dsg67 from Candidatus Thiomargarita nelsonii GenBank: KHD12528.1
MNSINNIVIVGGGTAGWTTAACLARVLKNTDTKITLIDSPEVATIGVGEATIPPLVEFIRFLGINEQEFV
TKTQATFKLAIKFTDWNNLGEHYWHQFGSVGADIDGKPFYQHWFKSTLNGNENAYTDYSPAIAMAKENKF
VVPPTQQQQQSILNGASYAWHFDALLVANFLTEFSTNLGVKHLKGHVECIEKHENGFIKNLILKDGRNIN
GDFFIDCTGQKALLIEGAMGSEFENWQKYLPMNRTIALQTENHGPLVPYTESTAHKWGWQWRIPLQHRTG
NGMVFCDKYCSDDEALATLTNNISGKHLTEPKFISFTTGKRKELWKGNCLALGLSTGFMEPLESTAIHLM
MKGVIKFAEMLPDQRCQQATINEYNRIMDIEFLSIRDFIILHYCTTSRTDSKFWQDCQNMPIPASLVEKL
ALFKSQGRLFRSEFDLFTPPSWYAILAGMNIKPDNYDRLIDISDINQVNSIMTNGLTSLNNTIIQLPSHE
AFVKQFCKNI
66) Dsg68 from Penicillium nalgiovense OQE91609.1
MAAIQTVPEQCTVLVVGGGPAGSYASSALAREGISVVLLEADNFPRYHIGESMLPSMRHFLKFIDCYEKF
DAHGFRVKNGGAFRLNWSRPESYTDFIAAGGPGGYSWNVIRSEADEILFRHAGESGASIFDGTKVTGIEF
EESSEDVVDSANPNPGKPVSATWSRKDGSTGLVKFDYLIDASGRAGLVSTKYLKNRRYNQGLKNVASWAY
WTGGGTYGVGTHKVGAPVIRTDASGWVWFIPLHNGTHSVGIVMNQAKATERKKAMDSPSSKEFYLENLNL
VPGIQALLEKGELVSEVKSASDWSYSASSYAFPHVRIAGDAGCFIDPFFSSGVHLALSSGLTAAVTISAA
IRGDVTEKEAAQWHSSKVAEGYTRFLLVVLSSLKQIRGGDEPVLNDWDEESFDRAFDHFRPIIQGTADAD
SEKKLSTEEISKTIDFCFRAFAHVPVERKDALLEKMKNHGVSDPTATDPKTREALEELKNTLSPEELDIM
NTIRGRRMIRAEDSLNIDNYRLDSINGMAPNLERGNLTLRKAEINKIDVSKKDLLSLLSGEAAEGKHHET
EETKAPAAAVAEVAEFAT
67) Dsg69 from Sphaerobolus stellatus SS14 GenBank: KIJ54121.1
MSNGVPSVPEKTTVLVIGGGPAGSYSSTLLAREGIDVVLLEASKHPREHVGESMLPSMRHYLRFVDLEEE
YDRRKFMHKPGAAFKFVHGQRECYTDFSILGPDRTTWNVFRAEADEIMIRHAEKRGVKVFEQTRVESISF
ENDGDPATARPIAAAWKNKSGETGTIKFDWLIDASGRQGIMSTKYLKNRIYREGLRNVAAYGYWQNVSVF
DEGGPRSNAPWFECLTDRYGWAWCIPLHNGKTSIGVVMHQETSNKKKAEGPSGLEAHYMEQLKLAPGIQE
LIGEKGTFVPGTVRSTADYSYHATSYSGDHYRLIGDAAAFVDPLFSSGVHIAMTGALSAAGTILGSLKGA
VSELEAQNWHDAKIGICQTRFLMVVLSAYRQMQHQGNKAILGDVNADNFEHAFEIFRPIYQGEQDTSTKL
TDDELEKMIEFTRNLFTPTTHQQYASVKQRHGDMLDLSAPVVSPGELDKVLDTEDSDAKAVLKRINSLKI
LRNETSPLSFTSEAVNGYILRLERGNLGLVKA
68) Dsg70 from Panaeolus cyanescens GenBank: PPQ70820.1
MSTEGPIPTKTNILVIGGGPAGSSAATILRREGHEVTLLEMAKFPRYHVGESMLPSLRNYLKFLGVEEDF
VKHGFLDKPGACFKLVPNLRESWTDFTALGPGYATWNVVRSEMDEILLRHSAKEGVKVFEETKVDSIQFE
GDPKTSRPISANWSKKDGTSGNITFDWLIDASGRNGIMSTKYLENRQMRENLRNVAVWGYWKDVNRYGVG
TKKANSAWFEALRDETGWSWIIPLHNGTTSVGFVMHITNSNKKKARLNPDGTKMSLTDHYLDQLQYAPGV
RELIGEKGSFIPGSTKSTSDFSYSATRYSGDHFRLIGDAANFVDPFFSSGVHIGMTGALSAAATICASIK
GEADETTAQAWHDAKVGIAHTRFLFVVLGAYRQMHLQSTPLLGEVHEESFDKAFEMFRPVIFGLADSQKK
LTDAKVNDVMDICQSFFDPTVDEDHIHATRQRYGVDLVKMQAPVLGKDKIQELVKDDEVGERVLKKFDAL
KVFSDDVEATYMGRNPLLGYRANVKRGELGLIKADEEDPLEKDILVAAP
69) Dsg71 from Asticaccaulis sp. AC466 GenBank: ESQ85030.1
MFLTCRRRLLDGAGFFLRLDTAMTTPKSGHRDAFFVLNGIEMTTTGPLRKIVIVGGGTAGWMVANALSKV
LGKSGPAITLIESEEIGTVGVGEATIPPILAFNALLGINEVEFMKETQATFKLGIEFVDWLRIGHRYFHP
FGIYGVDAGAVPFEALWQRSRHLGTPRPLNDFSVCARAAAMGRFMRPAGAGGPLAHLAYAYHFDATLYAR
FLRKYAEAAGVTRIEGRIAHTSQRPDDGFIEAVTTQDGRRIEADFFIDCSGFHALLIGGVMGAKFEDWNH
WLPNDRAVAAPSANMAPPTPFTTSTSRTAGWQWRIPLQHRTGNGYVYSSAHSSDQAAQDLLTTNIAGDLL
AEPRVIKFRTGRQRAFWIKNCLALGLASGFMEPLESTSIHLVQAGIARLLEMLPNRSCDPADIRRYNRLM
TTEYDSIRDFIILHFHATERRDTQYWRSLANMSIPDTLAERIDIYRHSGRVFRESDDLFSKTSWLAVMDG
QGLVPQAYDPLAEGVSPEQAQKHMEHIASVQAAAVKTMPSHHNYIAKYCSTAQ
70) Dsg72 from Stachybotrys chlorohalonata KFA69541.1
MSIPDSCAVLVVGGGPGGSYAASALAREGVNVVVLEADHFPRYHIGESMLASIRHFLRFIDLEKTFDSYG
FCKKVGAAFKLNNKREGYTDFIAANGPNGYSWNVIRSEADKLMFEHAEKSGAFTFQGVKVESLQFVPDDG
VAKDDTVCNPGRAISASWLRKEDGVTGNIKFDYIIDASGRNGIISTQYLKNRKFNQALKNVANWGYWKGA
TTYSPGTPREGSPVFEALTDQSGWCWAIPLHDNTLSVGVVMRQDLSLARKKSLGSPSMVEFYKDCITLSP
DIHARLADAELVSNIKAASDWSYSASTYAGSNFRLVGDAGCFIDPYFSSGVHLALASALSAALTIQAARR
GDCNELDAAKWHSAKVAESYSRFLLVVMTALKQIRKGDEPVLSDFDEDGFDRAFGFFKPIIQGLADADVG
GKLTQGLISKSVDFCFHAFQDITPNVRQAVLDKLDSMKSDPSVETKEDLEKLSEDELTILRTIRARQMLR
TEDTMNITSFANDVIEGYAPRLVCGSLGLSGMESRMAAPSNAETLFDSGIEILDENKS
71) Dsg73 from Verruconis gallopava XP_016211617.1
MTTIPEKATVLVIGGGPGGSYAATALAREGVDVVLLEADKFPRYHIGESMLASMRHFLRFIDLDSTFDNH
GFIKKRGAAFKLNDKPEGFTDFIAAGGPGNYAWNVIRSEADYLMFQHAGKSGVKTFDQVAVRSLEFTPCD
LELPDPKTPSPGRAVAACWSSKVDGTSGKISFDYLVDASGRFGITSTKYLKNRKFNQGLKNIANWSYWKN
AGRYAVGTQREGQPFFEALSDASGWCWLIPLHDGTASVGIVQNQDAAAAKKKAMDSPSQHDFYIESLKLA
PRIQALLAQGEMTAPVKQASDWSYSASCYASPNVRIVGDAGCFIDPYFSSGVHLALSGAMSAACTIRAVQ
REECDEKAAMDWHSKKVAEGYTRFLLVVLSAMRQIRKSDQPILSDWDEEGFDRAFAFFRPIIQGTADVSN
KLSQEELAKTIDFCLNAFQHHDADARDAMIKKLQEHEQEARMRGDVQAKADIDPDSLTPEELQVLKTIRA
RQMLRTEDVINIDSFGTDAIDGFAPRVKHGELGLMKGKNSGPAAPKMDLFAKAKEEPAMQTQVGTAVTAH
72) Dsg74 from Trichophyton rubrum CBS 735.88 GenBank: EZG06870.1
MSIPASCTALVVGGGPAGSYAASALVREGVDVVLLEADVFPRYHIGESMLPSIRHFLRFIDLDSKFDSYG
FVQKNGAAFKLNSKPEAYTDFVAAGGPGSYAWNVIRSEADHLIFKHAGENGAKTFDGVKVNAINFEPLSE
ENSDPVSTDLGRPVSATWTRKADKSSGVIKFEYLVDATGRAGLVSTKYMKNRTYNQGLKNVATWGYWKGA
SSYGIGTPREGDPYFEAIADGSGWVWLIPLHDGTTSIGVVMNQAMATTKKREAGSSSQQFYLDNVKQIPG
IWQLLDNAELVSDLKSASDWSYSASSYASPYLRIAGDAGCFIDPFFSSGVHLAFASGLSAALSIRAAQRG
DCDEMAAAEWHSKKVAEGYTRFLLVVMSALKQISDRDEPVLTDWDEESFNRAFDLFRPIIQGTVDVDKTL
TQAEIAQTINFCVNAFQNAGREEQDALMNKIKSVSETKNGEETDVVKKLKESLSADERRTLNTIQARQII
RSEDTMNIDNFTVDVIDGMVPNLKRGSLGLLRYVPKVKAGQQEDELRAKLGLPEKQESIFSY
73) Dsg75 from Penicillium nalgiovense GenBank: OQE96412.1
MSIPEQTSVLVVGGGPAGSYAAAVLAREGIDTVLLEADLFPRYHIGESMLPSMRHFLRFIDLDETFDKYG
FVQKVEFHLHKAIKKGAAFKLNSFPEAYTDFVAAGGPDAYAWNVDRAEADNLMFQHAGKSGAKVFDGVKV
TSIEFTPLDEQNGQTDSELPSPGRPVSASWARKDGTSGTTQFEYIIDASGRAGLVSTKYYKNRTYNQGLK
NIASWGYWENAKIHAPGTQREGQPFFEALQDASGWVWTIPLHNNKTSVGVVMNQATATTKKKAMEDSSTK
GFYIDTLKSTPETYDLIADAELVSDIKSASDWSYSASTYATPYIRIAGDAGCFIDPYFSSGVHLALASGL
SAATTICAAKKGQITESAAADWHSNKVGTGYTRFLVVVMSALKQITKPEEPVIGDWDEKSFDRAFSMFKP
IIQGSADVKSNLTSEEISQTIDFCMKAFHPAPKEQREAIFDKLASGSASASGSANPTLSEQTLSADEQRI
LTTMRARNAIRTEDLIHIDNFSVDVVDGMIPRLKRGELGLIDAATAHIKAPNADTKQSVSIFSY
74) Dsg76 from Stachybotrys chartarum IBT 40288 GenBank: KFA75658.1
MSIPDSCAVLVVGGGPGGSYAASALAREGVNVVVLEADHFPRYHIGESMLASIRHFLRFIDLEKTFDSYG
FCKKVGAAFKLNNKREGYTDFIAANGPNGYSWNVIRSEADKLMLEHAEKSGAFTFQGVKVESLQFVPDDS
LAEDDTVCNPGRAISASWSRKEDGATGTIKFDYIVDASGRNGIISTQYLKNRKFNQALKNVANWGYWKGA
KTYSPGTPREGSPVFEALTDQSGWCWAIPLHDNTLSVGVVMRQDLSLARKKSLGSPSMVEFYKDCITLSP
DIHARLADAELVSNIKAASDWSYSASTYAGPNFRLVGDAGCFIDPYFSSGVHLALASGLSAALTIQAARR
GDCNELDAAKWHSAKVAESYSRFLLVVMTALKQIRKGDEPVLSDFDEDGFDRAFGFFKPIIQGLADADVG
GKLTQGLISKSVDFCFHAFQEITPDVRQAVLDKLDSVKSDPGVETKQDLEKLSEDELAILRTIRARQMLR
TEDTMNITSFASDVIEGYAPRLVCGSLGLSGMESRTAAPSNAETLFDSGIEMLDENKS
75) Dsg77 from Bipolaris oryzae ATCC 44560 XP_007692298.1
MSIPEKTDVLVIGGGPAGSYAASVLAREGVDVVLLESDKFPRYHVGESMLASMRFFLRFIDLEKTFDAHG
FQKKFGATFKITEKKAAYTDFAAALGPGGFSWNVVRSESDELIFKHAGESGAKTFDGTKVESLTFESYSD
GEFSAENHLANPGRPTTATWSRKTGETGTIQFGHVIDASGRNGIISTKYLKNRRFNQGLKNIANWTYWKG
ATKYNAGSETENSPFFEALSDGSGWVWAIPLHNDTLSCGIVVYQELFFAKKKASGLDGLSFYKEYLKLAP
QINSMVANAEIVSEMKQASDWSYSASAYAGPGFRIVGDAGCFVDPYFSSGVHLALTSGLSAAVTIQAVRR
GQAGEEQAAKWHATKVSEGYTRFLLLVMTVLRQLRMKEAALITSEQEEGFDMAFKTIQPVIQGIADTNTE
DADVQKRTAKSINFGLESMNVSSAAEDAVVKKIREAENRPEMLEKLTTEEVSILDRITKRTFAHEKDELN
LTHFTGEVIDGFSARLVRGDLGFVNHAAQPATADQPVVSAAVDMSGLDRNIKQAA
76) Dsg78 from Bipolaris sorokiniana ND90Pr XP_007696461.1
MSIPEKTDVLVIGGGPAGSYAASVLAREGVDVVLLESDKFPRYHVGESMLASMRFFLRFIDLEKTFDAHG
FQKKFGATFKITEKKAAYTDFAAALGPGGFSWNVVRSESDELIFKHAGESGAKTFDGTKVESLTFEPYSE
GKFSTENHLANPGRPTTATWSRKTGETGTIQFGHVIDASGRNGIMSTKYLKNRRFNQGLKNIANWTYWKG
ATKYNAGSETENSPFFEALSDGSGWVWAIPLHNDTLSCGIVVYQELFFAKKKASGLDGLSFYKEYLKLAP
QINSMVANAEIVSEMKQASDWSYSASAYAGPGFRIVGDAGCFVDPYFSSGVHLALTSGLSAAVTIQAVRR
GQSGEEQAAKWHATKVSEGYTRFLLLVMTVLRQLRMKEASLITSEQEEGFDMAFKTIQPVIQGIADTNTE
DADVQKRTAKSINFGLESMNVSSAAEDAVVKKIREAENRPEMLEKLTTEEVSILDRITKRTFAHEKDELN
LTHFTGEVIDGFSARLVRGDLGFVNHATQSASADQPAVSAAVDMSGLDRNIKQAA
77) Dsg79 Arthrobotrys oligospora ATCC 24927 XP_011122134.1
MAIPQSCTVLIVGGGPAGSYAAAVLAREGIDTVVLEADKFPRYHVGESTIPSLHYLFKFIDFHETFSSYG
FNQKNGAYIKLAKNQPVTSNDFRALQGPNGFAWNLIRSEFDDLVFRYAGTCGARIFEETKVENIEFEPCS
IQTVPGSKEDSSGLFHARKPVSANWVRKIDGTSGSITFKYLIDASGRQGVLSTKYLKNRKFNENLKNVAS
WAYWKSDNVYAAGTPTEGAPYFEALEDCSGWAWYIPLHNGTRSVGIVQDQKLMAKKKASLGRPSTLEFYN
ECIKMAPTIKDLLKGAEFINNIQSASDWSYTASTYHIPNARICGDAGAFIDPLFSSGVHLAMNGGLSAAA
TICASIRGHCDEATAGSWHSKRTVESYTRFFLVVSSVTRQMRQQNEPILRDNDEEGFERGFQIFRPIILG
AVDNNIGNKHSKVGIAKALEFCFEAFTRVTSETKDSTPQDPKTLGFSSGNNTITSHRNLEGLRQNLTPNQ
IEILETLTSRRMIRDDRFEIDSHTFDTIDGYLLNAVRGKLGLVKAEQVKVNI
78) Dsg80 from Aspergillus niger Gen Bank: GAQ46952.1
MTVPQSCTVLVIGGGPAGSYAAAALAREGIDTVLLEADKFPRYHIGESTLPSLRHFFKFIDFYDTFDAHG
FYHKNGAVFRLAQAQPDAYTDFLEAGGPDAYAWNLVRSESDDLLFRHAGTCGAHIFDETKVDTIQFEPHI
SESSKPDSDDNKILNPGRPVSATWVRKDGSSGFIALKYLVDASGRNGILSTKYLKNRKFNDNFKNFANWA
YWKTDNLYGLGTHMEGSPYFEALDDASGWAWFMPLHDGTRSVGVVQDQKLVTEKKRELGRPSTLDFYKQC
VEKAPRTSKLLSGAEIVTTVRTASDWSYTASTYHIPNARICGDAGSFIDPLFSSGVHLAVTGGLSAAATI
AASIRGDCDEETAGSWHSKKTVESYTRFFLAVSSATKQIREQYEPIIQDMEEEGFQRAFDLLRPIIQGTV
DADDTGKISHSEISKALEFCFRAFTYVPPEKKDALFEKLKNLGVGSGQKDAREAKILDGLEQHLTTDELQ
VLEILRSRRMIREDPFEMDSFTLDTIDGMAPNLGSFLFTAISGRLLAAVAVHAAPAEPAHPMVTEAPDAN
LIEKRATTCTFSGSEGASKASKSKTSCSTIYLSDVAVPSGTTLDLTDLNDGTHVIFQGETTFGYEEWTGP
LVSVSGTDITVEGESGAVLNGDGSRWWDGEGGNGGKTKPKFFYAHDLTSSTIKSIYVENSPVQVFSIDGS
TDLTMTDITVDNTDGDTDDLAANTDGFDIGESTYITITGAEIYNQDDCVAINSGENIYFSASVCSGGHGL
SIGSVGGRDDNTVKNVTFYDVNVLKSQQAIRIKTIYGDTGSVSEVTYHEIAFSDATDYGIIIEQNYDDTS
KTPTTGVPITDFVLENIIGTCEDDDCTEVYIACGDGSCSDWTWTGVSVTGGKVSDDCLNVPSGISCDL
79) Dsg81 from Pestalotiopsis fici W106-1 XP_007837611.1
MSVPAQTSVLIVGGGPAGSYAATVLAREGVDVVLLEAEKFPRYHIGESMLASIRFFLRFVELEEEFDRHG
FEKKYGATFKITEKNPAYTDFAASLGEGGYSWNVVRSESDEIIFRYAGKCGAKTFDGTKVESLTFEPYPH
EGFDESVHLANPGRPVSANWSRKDGSSGVIKFDYIIDGSGRNGLISTKYLKNRSFNQGLKNIANWTYWKG
AKRFNVGEKNENSPLFEALKDGSGWVWAIPLHNDTISVGVVARQDAFFEKKKESGLSGEAFYKEYLKLAP
QIKNELLRDATIVSDIKQATDWSYSASAYAGPNFRLIGDAGCFVDPYFSSGCHLAMTSALSASVSIQAVR
RGQCDELTGAKWHTTKVAEGYTRFLLLVMTVQRQLRMKDKNIISTDEEEGFDMAFKKIQPVIQGVADTRT
EDEQTQRRAAEAVDFSLESFEITPEKQAAVISKIERSQAEPELLEKLTPEEVHILGNIVNRTFEREKDEL
NLTHFTGDMIDGYSAKLEHGNIGLYKREKALLNGTASRAAAVLKSIHQVA
80) Dsg82 from Nectria haematococca mpVI 77-13-4 XP_003040677.1
MSVPSQTSVLIVGAGPAGSYAACVLAREGVDVVLVDADKFPRYHIGESMLAAIRFLLRLIDAEEAFDKHG
FEKKFGATFKITDKREAFTDFSEALGPGGHSWNVIRSEADELLFKHAANNGAKTFDGTKVDSINFEPLPD
FEMGEGSHLANPGRPVSADWSRKDGTRGNIKFDYLIDASGRNGIICTKYLKNRKFNEGLKNLAQWTYWKG
AKRFNVSKRNENSPFFENLDDASGWVWAIPLHNGTLSVGIVARQDLFLAKKKELGLSGQEFYREYLKLAP
QISEMLSNAEIVADVKQASDWSYSASAYAGPYFRVAGDAAAFVDPYFSSGVHLALNNGLAAAVSIQASRR
GQADERAAAKWHATKVAENYTRLLLIVMAVQRQLRLKHEELITSNSEDGFDTAFKAIQPVIQGVADTHES
DASVQNKAVESVNFALESFEVTPEQEKLMTEKVVQAAQRAPETLQKMTPEEVDILKRMSHRVLHRNTNRN
NKGLVDFTGQVIDGFSAILERGDVGLIKVED
81) Dsg83 from Hydnomerulius pinastri MD-312 GenBank: KIJ58602.1
MTQTIVPTQAQILVVGGGPAGSYAAAVLAREGFDVVVLEAAAFPRYHIGESLLPSVRHFLKLIDAECLVA
AHGFTAKPGAAVKLNQHMREGYTDFIALNPNHGAWNVIRSEFDDLLLRHAAKCGATVIQRTRVSEIYFDE
DNPDCPISASWKNESGIEGRIRFDYLVDASGRSGIMSTKYLRNRRFNKSLQNTACWGYWEGAEVYMPGTS
RENAIWIEALNDESGWAWFIPLHDGSASVGLVMDQKISMSKKSAAREFSGASDYRLEDHYLSELKRAPGV
LKLLSRAKLRSKGEKEAVKTAGDFSYSATSYAGDHYRLAGDAGAFIDPFFSSGIHLALTGGLSAALTISA
SIRKTASEDLAQRWHSSKVGTSYTRFLLVVLGTYQQIRSQTVPIMSDVDEDNFDRAFSLIRPVIQGTADV
GRVVSEDELQKTMGFCRHIFAPTDPEMHSAVNTRLGSEILSPSGPVLTEAQINELVAQDDLEAKLVLCEV
NARKPIHAMYSPTQHFQLEAHLGHAAVLERRKLGLRRVTPCDTEL
82) Dsg84 from Gymnopus luxurians FD-317-M1 GenBank: KIK62692.1
MASTHTSTIPATATVLIIGGGPGGSYAAAVLAREGINVLLLEADKFPRYHVGESQLASLRHFLRFIDLEK
EFENHGFTQKHGAAFKLDKHKREGYTDFVFDDPKNYSWNTVRSESDELMLRHAARSGATVIEETRVMEJE
WDDARPMAATWKNTQSGQMGQVKFDYLIDASGRAGICSVKYLKNRHYNPDFKNVAFWTYWSGCGEYKPGT
SRAGSPYFEALSDESGWAWFIPLHIGTSVGVVVKQELSDEKRATAKTRGLDSSLYGHYMRLLDSAPNIKA
MIANAAIIKNNNEIVVRTASDYSYHSDSYAGPHYRIIGDAGAFIDPYLSSGVHLAISSGLSAAASICSSL
KGECSEDDAIRFHNAKIDASYTRFVLIIKSVYEHIRSQKATTLSSATEDNFDDAFLMFRPVIQGRIDSSL
SLSEEDKTRLVHFYSRHAFEPSMPEERHNLLKEFGDPVKSFNNADDIHSKAILRSMAVRKLLSVDETNHI
DNYVADVVEGFRLRLERGNIGIEKCR
83) Dsg85 from Botryobasidium botryosum FD-172 GenBank: KDQ09292.1
MNVPTHTEVLVIGGGPGGSYAAAALAREGIEAVVLEADLFPRYHIGESMIASVRHFLRIIGLDEKFDNYG
FTRKVGAAFKLNDFKREGYTDFLARGPQNYAWNFIRSESDELMFRYAGECGAKIFDGIKVTDLISQTGDI
VSTRPTSAHWKSKSGSFGIITFDYLIDASGRAGILSTKYLKTRTFNQELKNVATWGYWTGCSVYGAGTPR
NNSPFFEALQAALLLALVAIDESGWAWMIPLHNGTTSVGIVMNQEISNKKKANHPSGRSPSMQEHYLEQL
KFAPSILALVGPGELVKDATTGSVVKSASDYSYSASSYAGDHYRIVGDAGAFIDPFFSSGVHLALAGALS
AALSICAARRGDCTEEEAAVWHSSRVSTSFSRFLVVVLAAYKQMRAQAQPILASADEPDFDRAFEQFRPV
IQGSADVDHSTSARHASEAGSGCARPIEFCEQSDTTRPGGDSTAPKGPMWKTRTEDTFHIDHFATGVING
FCPRLERGSLGLTPVD
84) Dsg86 from Sphaerobolus stellatus SS14 GenBank: KIJ40868.1
MASNSDNAMLPAKVTVLVAGGGPSGSYAASILAREGINVMVLESQKFPRYHIGESTLASIRHFLRFIDLE
KTFDEYNFAKKFGAAFKLNQTRDDNYTDFVASDPSNYAWNLVRSESDHLMLQHVVSCGGLVFEETRVTDV
DFEPVLGSSETRPVSAKWRNKAGQTGTVSFDYLIDASGRQGLLSTKYLKNRVINADFRNVAVWGYWSGCA
EYKPGTLRAGAPYFEALTDSSGWAWLIPLNLKYTNESGTASIGIVMNQEIADAKRKDNVNSKPLSAQEHY
LQTLELAPTLKSMIEDAELLRPAGEPVIRSASDYSYSAQSYAGLNYRIVGDAGAFIDPYFSSGVHLALLN
GLSAAATICASMKGECQESDAAQWHTTRVDTSYTRFLIIVKSIYREIRSQQTPASSENGFDKEFEEIAPV
IQGHIDCRTELSASDMEKLVDFYSRHAYEPSTTEERTNILARVQDGSFNNSTLTKRENAILNSLKVRKLY
RLEDINRINHFVEDNIHGRRLKLERGRLGLVEA
85) Dsg87 from Piloderma croceum F 1598 GenBank: KIM75794.1
MIFPPPHHPPKHVQVLVIGGGPAGSYAAAALAREGLDVAIFEATKFPRYHVGESLIPSIRHYMRFIGAEE
KLANHGFVRKPGSAIKFNQFKREGYTDFVALGHNNNAWNVVRSEFDEILLKHARSSGAKVTELIRVKSLS
FSSTDPSKPISACWTHSPSFCFSSSSSSSSSGTDDDLPNAPITGTTTFDYVIDATGRAGLISTNYLKNRH
FNASLKNIAIWGYWKDVDTYGVGTEREGAPWFEALTDESGWAWFIPLHDGTTSIGIVMNQKIFNADAKTT
DSSPSPSLTSRYRSYLPLAPGLLELIGDGVLTTKPVSPPNSPNGSDSTANDFRSKEPLVKSATDFSYSAD
QYAGHGYRIVGDAGSFIDPFFSSGVHLALTSALSAASTICAALRGDCSEQEAAEWHTKRVATSYTRFQVV
VLSAYKQIRAQSTDVLSDINEDNYDRAFGFLRPVIQGASDMGTRLSENELQKSLDFCVNLFSPTSPEQHE
RVANSGVSKNLLDVNAPLMDSDTLEGALRKLAETKMVVNKINARRVVHSEYAINNLESEGLNGYVVRLEK
GKLGLTRVLLRTLIPFNLLRILPNVRDEAVFDLISDTSSDLEKNFAKSS
86) Dsg88 from Botryobasidium botryosum FD-172 GenBank: KDQ15003.1
MSAAVPQKTQVLVIGGGPGGSYAASALVREGHEVVLLESAKFPRYHIGESMLPSMRHFLRFIDLEDEFEA
HGFAIKPGAAAKFTAHKKEGYTDFVEKGQTKGTWNVIRSEADEIMLRYAGRQGANIIEETKVTSINFAGD
PAESRPISAEWKNVQGQTGTIEFEWLVDASGRDGIMSTKYLKNRRFNEAFKNVAFWGYYTGTGKYEPGTH
RENAPFFEALNDESGWAWFIPLHNGTTSVGVVMNQEVYTQKRKSEKATRPSLQEHYEGQLAEWAPTIMRL
IGEGKIKTNVEGPTVKMASDYSYNAPSYAGDHYRIAGDAGAFIDPFFSSGVHLAILGALAAATSICAEIR
GQCKSADAEKWHTDKINVSYTRWLLVVMSAYKQMRASNEPVLADVDEESFDRAFDFFRPIIQGSSDYGKS
LTRDELNKAIDFCGAIFHEFKPEDIDAAVERAGPAVLEGNAIPGAAPAAVDPEDEKAQEVLKLLSASKHV
MTKEQDHGLHVFGADAVNGLKVILERGNLGLYRVDSE
87) Dsg90 from Aspergillus carbonarius ITEM 5010 GenBank: OOF93604.1
MAIPQKATVLVIGGGPGGSYSASALAREGIDTVVLEADVFPRYHIGESLVASIRPFLKFIDLDDTFVNYG
FVRKNGAAFKLNNQKEAYTDFILEAGADTFAWNVVRSESDDLMFKHAAKSGAQTFDGVRVTSIEFTDDDD
DDDNNTNRPVSASWKAKDGRTGSIEFDYLVDASGRAGITSTKYLKNRTFNNYLKNVASWGYWEGATPYGM
GTPVEGQPFFEALQDGSGWVWFIPLHNNTTSIGIVMNQELSTQKKKLSTTTSSRAFYLESLAGARGISRL
LDPTTATLTSDIKHASDWSYNASAYGSPYLRIVGDAGAFIDPYFSSGVHLAVSGGLSAAVSIAASIRGDC
PEEAAWKWHSQGVANRYGRFLLVVLGATKQIRAGDRPVLNGVGD
88) Dsg91 From Rhizopogon vesiculosus GenBank: OJA19373.1
MSQQIPKNAQIVVVGGGPSGSYAASALAREGLDVVLLEAAHFPRYHIGESLIPSVRHYLRFIDAEQKLVD
MGFKHKPGAAMKFNQFKREGYTDFVALGHSNSSWNVVRSAFDKMLLDHATSCGTKVFERTRVESFRFSAT
DNSRPVAAEWFCAADGKRGVISFDYLVDASGRSGLMSTKYLRNRHFNASLKNVAIWGYWVGVSKYGINTP
REGAPWFESLTDESGWAWFIPLHDGTTSIGIVMNQAIYNEKVRTLKGSSLEDRYRFSISLAPGLVRLIGS
GRIVQKEGVERQSGQFDLLIRSASDFSYSASSYGGPGFRLVGDAGAFIDPFFSSGIHLAMTSGLSAAVSI
CAAVRGDCSEIDAAAWHTKRFSLSYTRFQMVVMSAYKQIRSTDLEILTEVDEDNYDRAFAAIRPVIQGAG
EMGSRLSEKELESALEFCSKCFNPASHEHLAFAAKQDLPKDILDVTGPIIDPQVIDSVISKTSEHMDSKG
GQQLFGSVEDLKLLLDQINGRRVVHREYTINNFEVEDVNGFVVRLRKGYLGLMRTSTTSKVN
89) Dsg92 from Hebeloma cylidrosporum h7 GenBank: KIM45198.1
MPSALSVSSLPPKLTQVLIIGGGPAGSYAAAALAREGIQVTLLESSKFPRYHVGESLIPSARHYLRFIDA
EKKMINCGFARKPGSAIKFNQYKREGYTDFVALGHNNNAWNVVRSEFDLMLLNHARTTGASVYEQTKVDS
ISFSSSDPDRPISVSWTHTPPPCPPSPPASPTDGVFPSLFSSKIVTPDQPPPPARGETAFAYLIDASGRA
GILSTRYLKNRHFNASLKNIAVWGYWKNASQYGSGTAREGSPWFEALTDESGWAWFIPLHNGTTSVGIVM
NENMYKAKYQQPPSSVFAAGSSSNSHVTIRYLSNISLAPGVVKLITPSGVLDEGSVKSASDFSYSAPSYA
GNGYRIIGDAGAFIDPFFSSGVHLAMTSALSAAATICASIRGHCSETRSADWHTRRVSTSYTRFQVVVLS
AYKQIRAQSHDILSDINEDNYDRAFSFLRPVIQGASDMGARLSETELQKSLDFCLNLFNPTTPEQHECLS
HYGDVAKELLDVAGPVVDPSIFERSLHVSQASMGDTEDAANSSDCEKAVETRMILNKINARRVVHPEYAI
NNLETESLDGYVVKLERGKLGLTKAPF
90) Dsg93 from Paxillus involutus ATCC 200175 GenBank: KIJ15465.1
MSSAIPTHTQILVVGGGPAGSYAASALAREGLQVILFEAAQFPRYHIGESLIPSVRHYLRFIEAEQKLAE
YGFKHKPGAAIKFNQFKREGYTDFVALGHSNSSWNVTRSAFDKMLLDHARESGACVHEKTRVNSLRFSSS
DPSRPVAAEWSQSSETDHSGVISFDFLVDATGRGGLMSNKYLRNRHYNESLRNIALWGYWSGVGAYGGGT
AREGAPWFEALIDDSGWAWFIPLHDGTTSIGIVMHQELHNEKSKALHGSSTVSRYQAFLSLAPNLTALIG
RGVLVSKLSVDGPPGSLDPLVRSASDFSYSASAYGGNSFRIIGDAGAFIDPLFSSGVHLAMTSALSAAAS
ICGSIRGDCSEAIAAAWYTRRFSLSYTRFQMVVLSAYKQIRATNFDVLNDVDEDNYDQAFASIRPVIQGA
SDMGTRLSEAELQGALDFCSKLFSPTSPEQRACALRYGLPTKVLDVSAPLLDPKDIDAALSRVEGISSDG
NLNHDARLVMEHANARRVLHREYAVNNLEAEEIGGHVVRLERGSLGLMKLRG
91) Dsg94 from Amanita thiersii Skay4041 GenBank: PFH50120.1
MDTVPSSTTVLVIGGGPGGSYTASVLSREGFDVTLLEAVKHPRYHVGEGMLPSMRHFLRFVDMEEEFHNH
GFKHKPGATFKLHHSTPETFTDFSTLGPSRTTWNVIRSEADEMLLRNASRQGVKVFEETRVTSIDFEGDP
ATSRPIAADWTNKKGESGKIKFEWLVDASGRAGIMSTKYLKNRNFREGLRNIATWGYWRNVKIYAEGTKR
SNAPWFEAMTDGLGWAWLIPLHDGTTSIGIAMHQNVSDMKKKNHPGGKPSLTEHYLDQIKFLPGVLELLG
EQGELVPGSVKSSTDYSYSASRYSGDHFRIAGDAASFVDPFFASGVHIAMTGALSAATTICASAKGQVTE
SEAQHWHDAKVGICHTRFLIVVLSAYKQMQSQNRPVLSDVSEDNFDRAFSLFRPIIQGAADTTNKLTEEE
LEGMLDFCMHLFDPGEHAGVAQRLQPDLLALHGPVMGSAELDKALPPEDVEAKKFLSRFNALKILRNDTS
PESFGTEAVDGYTVQFERGHLGLVKAPST
92) Dsg95 from Hypholoma sublateritium FD-334 SS-4 GenBank: KJA20552.1
MSTPAIPSHTTVLVIGGGPGGAYSSTVLARDGVEVTLFEAAQFPRYHIGESMLPSINAFYAFVGAQDKLR
AAGFCPKPGAAVKLQQGKKEAYTNFIERNEHDASYNVVRSELDEILLRHSQEAGTAVFEQTRVTDIVFDE
KAPESDPRPIGANYVRNGTTGYISFDYLVDASGSKGLMSTKYLKNRKMNQTLHNIACWGYWSGQGMYMPG
TYRHNAPWFEALSDESGWAWFIPLHNGTVSVGFVMDKAISIQKKADLREKDPEAFSLKAHYLDQMQYTPG
LRELLKNATMKDGDLEGSGPVKSTSDFSYSASNYAGDHYRLVGDAACFIDPFFSSGCHLAHLGGLSAAMT
ICASLRKHCTEAQASHWHDTKVATSYTRFLIVVLSAYKQIRSQVNNILSDVDEDNYDRAFDFFRPVIQGT
ADVGKKLTEDELQKTIEYCTNIFLPGDPELRESVGERIGVEMLSNTQPIMSMDEMEKITGGEEDAMMALK
QVNARKPLVGLYGALDSMKSENIGGLVAVLTRGQMGLSVAEPAT
93) Dsg96 from Termitomyces sp. J132 GenBank: KNZ80988.1
MSSLKHPPQVPFSDRRPPSADPFQHTQVLVIGGGPAGSYAASALAREGLDVTLCEAATFPRYHVGESLIP
SARQYLRFIGAESALVDHGFVFKPGSAIKFNQFKREGYTDFLALGCENNAWNVVRSEFDQLLMNHARASG
AAVYERTKVTDVSFSSTDPTKPVSVTWSHTPTPSVSPSTAPWAPLTSFLGKIMSPLTVLKSPVITGTTTF
NYLIDATGRAGLLSTKYLKNRHYNASLKNLAVWGYWKGTTLYGAGTARQGSPWFEALTDESGWAWFIPLH
DGTISIGIVVNHKIFDRALKQPLPPSPFSHPSTFNPTNSKIIAYYLSALALAPGVVELITSGGSMVEGSV
KSASDFSYSAASYAGSNYRIVGDAGAFIDPFFSSGIHLAFTSALSASATICASIRGHCPELSAAEWHSRR
VSTSYTRFQIVVLSAYKQIRAQKMDILCDIDEDNYDRAFAFLRPVIQGASDMGVRLSETELQKSLDFCVS
LFNPTSPEQHERLSRSSGLCNEVFDINAPLVDPAIFRDALQIGFQSLDSCSEIDSDSDTDGDQSFSESDR
VLETKLILEKINARRVIHSEYHLNNMEVESIGGYVMRLEKGTLGLARTTHKAR
94) Dsg97 from flavobacteriales bacterium TMED228 GenBank: OUW92352.1
MATKIQNIIVLGAGTAGWLTALFVRKLFPHYNIKIIGNKKIGIIGVGEATTPPFVDFLREIDIDPLAMVR
ETGGSIKQGISFEDWNGDGKKYFHGFYEKFLSDVSIPPIFSHDCGDYYYKHLIHKKLDFNEYSYATKLSY
QNKTDLDGIAYAIHFDTNRLSTYLGKIAKERNIEYVEGEYSKMKLKYDFIFDCSGLSRLIIKDKSKWKSY
RKYLPMKHAIPFHLPVKENKPYTSAIAMKYGWMWQIPLQDRIGAGYVFDSDYIDAAQAQEETEKFLGHKI
DVRKVINFEAGRHEKYWVDNCMAVGLAACFIEPLESTSIHLTVLQLQLLRQFASDLFDGTNDMFNEVITN
TMDEILYFIYLHYITKRKDSSFWRNFKKDYPCPPAFKPVLQAIQNNNLKHYDIKSTNRIQPGFSVTSYLQ
IANGLGLFKKDINIKEYTNLTPTVKEIKKFIDQKTQSI
95) Dsg98 Metarhizium anisopliae GenBank: KFG78717.1
MAVPPSCTVLVIGGGPAGSYAAAALAREGIETVVLEADKFPRYHIGESTLPSLRHFFKFIDFYDTVDAYG
FYHKVPSSLHFFHLNEELTSPYQAKNGAVFRLAQAQPDACKSPSPAYTDFLEAGGPNGYAWNLIRSEFDD
LLFKHAGTCGAQIFSETRVDTIQFEPVANGLKPDMNRNLGDNLNPGRPVSATWVRKDGTSGSITYKYLVD
ASGRQGILSTKYLKNRKFNNNFKNAAIWAYWKSDNVYGPGTHMEGSPYFEALDDASGWAWFMPLHDGTRS
VGIVQDQKMATEKKHELGRPSTLDFYKQCLQMAPGIRELLSEAELIPHVRAACDWSYTASTYHLPNARIC
GDAGSFIDPLFSSGVHLAITGGLSAAATISASIRGDCSEAAAGSWHSKKTVESYTRFFLAVSSATKQIRT
QHEPIIKDMDEDGFQRAFDLFRPIIQGTADADEAGKVSQLEISKILHFCFKAFTYVPPEKKDALFDKLRK
LDSKALQDDAKQVQTLDGIEKHLTADELQILEILRSRRMIREDPFEMDSFTLDTIDGMAPRLVRGTLGLV
NYEQAKIDKAHFYSQDFLDGNYPGIREGSVHLPTSRVQLG
96) Dsg99 from Deltaproteobacteria bacterium TMED58 GenBank:
OUU34213.1
MKICIIGGGTSGWWCAAYMQKFLDAEITLIESKEIPTSGVGESSLPQIGAFFEELGIPEEEWMNGCNAVH
KYGNMKYEWDGVGKDPFLMTFWQDDPKGRFDKWYQEYKSGVKDKNSHTELYNRDGWRSVAYHLDANLANS
VVKDYCKDVNHIIDTLDELPEGYDLYVDASGFARKFTTDKTEVIWDHHLVNSAWVCPFQLEGEINPYTQT
IARECGWQFIIDLQNRTGSGYVYSDKYISDVQALEHFKGWTEGRKNYNNIVPRLIKWRPNVLKNSWKDNV
VTIGLGQGFVDPLEANGLYMVVYSITLLVKCILKGSKPEAYNKAMLKVQKQNSDYLLHHYMLSDRKDTPF
WEYYSKFDMDESLWKNYKKYPNKYNNLYPDALWAQLGIYFEKFKHYTP
97) Dsg100 from Ophiocordyceps unilateralis GenBank: PFH59609.1
MAVPKSCTVLIIGAGPAGSYAACCLAREGIDTVVLEADKFPRYHIGESTLPSLRHFFKFIDVDDAFDAYG
FFKKGSSRNGAVFRLNQAHPDALTDFIEAGGPDGYAWNLIRAESDDLLFRHAKACGAHTFDETKVDSIQF
ERGTDRTCFGEGQDKAMDSGRPVSATWSRKDGSAGTIAFKYLIDASGRHGILSTKYLKSRRFNRGFKNVA
SWAYWKSDNLYGQGTSWEGLPYFEALQDASGWCWYMPLHDGTRSVGIVQDQAMATDKKRKLGKPSTSEFY
RQSLELATRTNELLSGATLASDIKSASDWSYTSSTYHIPYARICGDAGCFIDPLFSSGVHLAIAGGLSAA
VTIAASLKGDYDEETAGSWHSKKTVESYARFLLAVCAATKQIRYEDEPVMHDFDEEGLQRAFDILQPIIQ
GTVDGEARGRTTDIEVSQVLKFCFRAFNYVPHEKKEALFEKLDRLDPGFGEGDAAKRIEEMHKHLTAEEM
EIVEALRSRRLIREDVFTLGSFTLDIIDGLAPRLVRGELGLVKASKARLDSRHFLSAPFLDGKVEAIRTH
GEGI
98) Dsg101 from Amicolatopsis coloradensis GenBank: OLZ53805.1
MVIVGGGTAGWLSAAYLNRAFGGKVDITLIESPRIPRIGVGEATVPTLRTTFAFLGMKEEDWMPKTNAVF
KSAVRFNDWRKPHEGRDSHTYYHPFFDVPEPAVQNYEKPFHKRFGRGVSLAHFWLKQRLAGDTRVRETFG
DAGMALQRLCELNKAPKPLPGTDAPDPGYRYAYHFDAALIAKYLRELATGRGVKFVSADVTSVTVDPRGT
IEKVVTDTAGEIEADLFLDCTGFRGLLINKTLNEPFVSANDVLLCDSAVALPARHREGGLRPYTSATAKP
DGWIWEIPLADRDGTGFVYSSAFTTPDKAERRLREHLGGRGYDIDGNHIKMRVGHNRRSWVNNCIAVGLS
SCFVEPLESTTIALIEYQLALLVLHFPDSDFDERRKARYNELMVGAFEDLRDFIVMHYTLTDRDDTEFWN
AVREAPIPASLEEKLTEYAESVIIPDGSQLRLFETRSIWAILSGMDFGFKKAPPSVEKMNDAAAWEMFEK
IDKEREIYSAGLPGHREYIEALHRGF
99) Dsg102 from Aphanizomenon flos-aquae WA102 GenBank: 0B045584.1
MTKNIVVVGGGSAGWLTALTAKKKYPKLNVTVIESKDIGILGAGEGSTPYLPLFLETLDISIEDLVKNCD
ATIKNGIKFSNWNNDNDFYYHGFGFIDPSLGTEALSSKFLSASPMLVSSIALNNDLKDLDFTENVSEKNK
VPFVLEKNKSGKTVSEYKKIGKTSFHFNATKLAERFKDIGLERGIEVFENTITKVSLDENNNVVGLDLDS
GITIPSDFVFDCSGFHRLIIGKTFNSKWKSYKEFLPVDSAIPFFLDMTEKIPPYTEAIAMKYGWVWKIPL
QNRFGCGYVYDSSLISQEEAIKEVEEFLGFTPYYPRKDKGGFSFSPGSFEEPWQNNCVAIGLAANFVEPL
EATSLWVSMVALTEIFSSPDFLTNNSDEIRSEFNKLILNMNDDILNFIYLHYMSLRKDTEFWKKFSYEMA
PDELKQKLKVWEKRMPGKRDNGNFWNSASWFVVASAQEKINKGLAQEYVDMSDEYKKAVDSYEYYKKYRE
YKVTECTDHRQFLEGLK
100) Dsg103 from Rhodobacteraceae bacterium PARR1 GenBank: OYU17741.1
MTFWPRMATGCRNGRACHSARQAKTMWPRRICVVGGGTAGWLAAMMLGDSARRGGHPCEVTVIESSKIGT
IGVGEGTTAVFRQMLQHFGLDEMEFLAETGATIKFGIRHRDWRRLGHSYDGPIDDPHRVTGFEVNALDLY
QVSRGESVGQVHLFQHLLSRNKSPFAVVDGRHIAVGPFHHAYHFDQALAGKWLRSKAKAIATIDDQVLRV
ERLAESGDITALHLEGGARVEADLFVDCTGFRRALIGPMGGTWVSYRDMLPVNRAIPFWLDIPKGEEIDP
CTLAWAQGSGWMWKIPTQSRYGCGYVFSDAHITPDQAKDEIERVLGRPIHVRNDIRIDAGRLDRQWIGNC
VALGLSSSFLEPLEATSIHGTVVQLMLLASVLPNPDDRARLAFNAASARQVDDFRDFIRLHYVSERRDTP
FWRDVAGNLPPHLADRLAAWGGRVPGAADFAPFPMGLPHTDHHLHVPVLDGLGLLDPAKAKDWLAAHPKL
RAQARAEAAKLTGEYKRAAGRAMGHRAFLDGLGVTA
101) Dsg104 from Gammaproteobacteria bacterium MedPE GenBank:
OIQ47327.1
MPQKAIKTLVIVGGGSAGWMSASFLNHIFNLKEKQIDIKLIESSEVETIGVGEATIHSIRFFLSTIGISE
REFMQKTQAIFKHGILFKDWSGQEKDEYYHPFEHPKVNDGIDVVRHWVNLNSNTEKSSRFDFSVSAQSLC
ASQNKSPKSQGNKDFEGYFPYGYHLDAAKFAHFLRDFSLTKGVKRIEGHVQEVILGTDGDIQRLILKNGL
QIDGDFFIDCTGFSSVLMKAMGNKEWVDYSDSLLCDRAVTCQLEHNKENQEHRPYTIATAQKSGWIWDID
LQSRRGMGYVYSSSFCSTEQAEIDLSVYANTAREKLSFKHLQMKTGRMEKIWFKNCLAIGLSAGFIEPLE
STGIYFIDMGIRFFGDYITSGNVNTLLIDKYNTVMGQLMDQSKDFISLHYTLSKRNDSQFWRAYQHDVPI
SETLSANLTLWKHKIPTAIDFSAQITQFTSANYTYILYGMKYFPEPAVTSNLFTSEDRSMKNIEYVKSRS
NQMNNKLPTMSQFLKNI
102) Dsg105 from Asticcacaulis sp. AC466 GenBank: ESQ85779.1
MIISRLNGKNGKPPIMTKIASEPASPPHRDVLIVGGGAAGWMTAAYLAKHLGTDRNGGPRITVMESPDIG
IIGVGEGTFPTIRNILRTLGIDEAGFMRESHATFKQGIRFDDWEVTPKDGRRSHYFHPFEQPYWSREELN
LLPYWLLQDKDKRLPFAEAVTFQKKVADSKLAPKRIHQGNYQGPLNYAYHFDAHRFAGVLAKYAKDLGVH
HLSGNLDGVTLDADGAIAHITAKEHGDLKADLYIDCTGFRSEILGKAMGVPFKSIKDTLFTDRAVAIQVP
YEKPDSPLESYTISTAHEAGWTWDIALSTRRGIGYVYSSDHTDDDRAEEVLRAYVGPMAEGVEARCIRFN
AGYRTQHWVKNCIGVGLSAGFLEPLESTGMVLIESAVNKIVEFFPFRGPLDASAHIFNEAMTKRYETIIG
FIKLHYCLTKREEPFWRDNTRPDSIPPHLRELIALWKFRPPSRFDFTLDNESFAFFSYQYILYGMNFETD
YEAARGSLQHTDLANHLFARISQFGDQASKDLVSHRQLINAVYKGGFVERPNAPMAVAR
103) Dsg106 from Asticcacaulis sp. AC466 GenBank: ESQ83834.1
MFMNSVQQQEIVILGGGAAGWIAAALLARKTDRSQTRVTLVESEEIGIIGVGEATVPVLAHCNALLGIDE
YDFIRNTQGTFKLGIEFCDWGVAGNRHFHAFSDYGHQVDGVSTHHYWLRLRQSGDAHPIDDYSFAYAVAK
NNNFAPTDPQNPRYHHAYHFDAALYARYLRDVATGQGVQRIEGKMTHFDLESASGNITAIHLANGSRVPG
DLFLDCTGFASELLGKALETPFVDWSRWLLCNSAMAVPSKRTGAPMPFTRSTAHAGGWRWTIPLQHRCGH
GMVYNSDLWSDDAARDALTGNVDGELLAEPRVFRFTSGHRKQFWNRNCVGIGFASSFLEPLESTGLQLIV
QGVLKLLQFFPQRIIDPVLRDEYNRISTREIERIRDFIIAHYYLSRRPEPLWAACRNIEVPDSLRHKLEV
WNASGQIALGDLESYMEPSWLAILLGNGVVPARYAVAADLYPLEQIRKGMKLRREEIVRSAQAVTSHQDF
IDQYCKAP
104) Dsg107 from Dyella thiooxydans GenBank: AND70239.1
MAQRPEFPAGLRPFFAIGQVSEDDGTAAGEEPAMARINKVLVVGGGTAGWLVACYLARAMRSSDPSGIQV
HLVEAENIGLLGVGEATFPSIRGTLAAIGLDERHFLDGAHATYKQGIHYRHWVRPPGTPGRDAFFHPFNQ
PSQRPGGPELLPYWLLGEAPAELPFAEAVTLQSRVVEGGRAPKRPQDPDYQGPLNHAFHFDAACFARVLA
EHGTQTLGVHRHVATVERAELDERGAIARLITTELGPMTADLYVDCTGLRSHLAGGTMQSPFLSRADVLF
ADRAMAMQVPYDRPDAPIPSYTIATAHEAGWTWDIGLQQRRGVGYVYSSRHTDDARAEQVLRGYLGNAAE
GLTPLRIRFETGYRPEHWRHNCVAVGLAGGFVEPLESTGIALVELGAYLLTHALPADLDDLPRIARHYNT
MMVARYERIIDFIKLHYCLSQRRDTPFWRDNTAPGSIPQTLQDKLALWRYRPPHRLDFVGDLEMFLVASW
QYVLYGMEFRTDLTPMRRSYTQVAEARQEFATIQQVAARAQDDLPDHRAFVERMVREHRERAGRAHAAA
105) Dsg108 from Euryarchaeota archaeon TMED97 GenBank: OUV27629.1
MKIKNVCIVGGGTTGWMMAVALNVNVPNLKVTLVESEEIPSIGVGEATIPLTAKFISSVLKFDEKEWMAA
SDATYKTAIRFNNFSKIDESFWHPFWSDDEIHYNTYDWLIKRQIEDLPTEDFYKSNFIAWYMSMDKRFQE
IKGFQHAHHMDANKFARYCQTQFKGTHINATVSSVEEKDGYIKSITVDGKKIKSDLFIDCTGFNALLIGE
TLNEPYTSYEDTLLNDSALVCRIPYGNDPFTNRQQECHPFTDCTALSSGWVFNTPVWSRTGTGYVYSSKF
QSREDAEQEFRIYLVDRFGGDRGDIAEFRHISFKTGKYERSWVNNCLALTLASGFIEPLESTGLALACWQ
IENFIDVLKDDDMSSFIRATYNDKVNMAYDEIHTFIAMHYANTKREDTEYWKHIKNNLHITQKMVDYAKN
DNVPDIWFPKKSRECVLIGLDIPSEYSKQHITWHGENFESIMKSDDNEKEFMTAGVQYLNGRKNMYQSIS
NDMPWHEDYLKEHIHVESEDS
106) Dsg109 from Albimonas pacifica GenBank: WP_092860541.1
MTAMSGGPDPLRVLVAGGGSAGWMAAATLDAALNRGGARAVAITVVESPDTPRIGVGEATIPTIRRTLRR
LRIPEAEFLAAAEATFKQAIVFADWSGPGSGFAHPFHTRPGDGAEQAAARFLRSDGRTPFADLVTPQPAL
AAAFRGPRRAGDADYVGPLPYAYHMDAEAFAELLAARAVTRGVARVSAHLRPPERAPDRPLEAVEATDGR
RFAADLFVDATGFRRLLIGQGGFLDQSRHLICDAAVALRAPCAPGPTRPFTVAAAREGGWTWDIPLRTRR
GRGYVHATAHLAPEAAEDALRAETPGAGEARRLRFQVGRLAQPWQANVVAVGLAAGFVEPLESTGLHLAD
LAAGLLAENAPLAGPNPGLARAYNALLAAAHDEVVDFVNLHYAASPRRDTPFWRDAADPARRTDRVAHLL
ELWEARPPVAADFPSSLQAFNHRNWEFILHGLGWRPRALGPAGGPPLAPDPELAAEARRLAAELPGHDAL
LAALAPR
107) Dsg110 from Pseudoalteromonas byunsanensis GenBank: OHU95107.1
MTATLINQAYNKHHKLVDIRLIESPDVDIIGVGEATVPAIKDFLQAAGIDEAEFMNYCNATFKNGIMFEN
WRQPKHGKMHRYVHPFDFERVEKRLDIATSWVLSERQRPFDESVSLASTLIQHNLTPKTRTTKPYHGIVH
YSYHMDARLFGQFLRQRAMAAGVTRIEAHVESVNTDNGQISSIATTQGLFESDLFIDCTGFRALLISALE
EKSSNWRSYQDELMCDSAVTVQIPHSEEHIPRSYTVAHALSCGWAWSIDLQNRTGNGYVYSSKYCSKEQA
ELEFRNYLKLDNNVALNHIDMSVGRRKRHWIGNCVAIGLAGGFIEPLESTGLHLIFLAARFLVLHNNFQY
CEANIAGFNQTMNATYDELKDFIVTHYVLSDRDDSDFWRDISKTLDACPQLAQKLDLWQSKVCEFFDVSN
STSHMFTDTSYRYILFGMDHIPQIKIPYFDGEFTDVFEFVKSRQQKAVAIALNHVDYFSYDVKGQVTVKL
SQ
108) Dsg111 from Euryarchaeota archaeon TMED129 GenBank: OUV65970.1
MRVESIVIVGGGSSGWMAAAMLSKTFPKMQIGLIESEQGPIGVGESTLGHFNRFLKRLGLKDKDWMSYCN
ATYKTSIAFKNFRHGEGERFQYPFGEFDLFDYKDTLQRYFELGCKYGVDKYPPDEFANFANNQTYLADQC
KISADPIPECTYDMDRDTAYHFDAGLFGNYLRDHHCIPNGVMHLKGEIEKVMKNPDGSIDSLVTTQDGLI
KADLYIDCTGFKSLLLEQHMGSEFISFKDKLFNDTALATQIPYSDRENQMETYTDCVAMNAGWVWNIPLW
HRVGTGYVYSSDYINECEAEVEFRKYLSERYTPEIAQDAKLRKINIKHGKHEKAWVKNVVGIGLAYGFLE
PLESTGLMTTHENILLLCDTLQRRQGFYSRFEQDSFNYNCDNMIESMKNFVALHYALSQRDDNKYWRDCT
NINFDIDPLWKQSTRVAHSNVVTMLDNLEDAFYNLEQHSGSIYIAAGQGYRPFSEGMFEERMSADKESDE
WSSILEEIHTKYQQDRKIMMEWVDKLPSHYEYLRDNIYDLQEEETVG
109) Dsg112 from Nostoc minutum NIES-26 GenBank: RCJ37336.1
MNFHIKKVAIVGGSSAGLLSAVTLKYFFPKLHILLLYSKKHAPIGVGESTTAWFPQFLHEHLNISREEFY
KSIWPVWKLGIRFEWGVPHISHFNYTFDGQFRYESQLLSKIPGFYCMHDMRQASRYSILMDKHHAPLLHD
GKGNIKILSDGFGYHIDVYEFINYLTAKALSLGVDIQDLEVLDAKLDEYGNVQHLCCADDLKVNADLFID
CSGFKSQLLGKALQEKFISFGYRLFCDSAIVGNWKRRSPIFPFTTATTMNSGWRWRIDLRDRVSFGYVYS
SSFCSQDEAIQEYLSLTPYATEDLRKISFRSGRYKRFWVNNVIAIGNASGFVEPLESTGQHMIVETIWRV
VLALQDSNLCPTPKLIDATNRYVVDLWDEICDFLTLHFKFNRRLDTPFWKYCQEETDLGSLQNLVELYQD
SGVCHAIAHLIPKSSIFEIDGYLTLLCGQQVLVKNLQPMADAEITEWLKYRQILHNNLENSVSPQEAFYF
LESLY
110) Dsg113 from Cylindrospermum stagnale GenBank: WP_085960655.1
MHVEKTIHNVVVLGGGSAGFLSALALKVKMPSLNVVVVHSKTIPVIGVGEATTAWIPWFLHTYLGLNRQQ
FYEETQPIWKLGIKFIWGNSHQSHFNYPFVTHLADKLSVLDKSTAYYCLDSTRESSIYSLLMEQYKSPCF
RKENGDFVFDERFGYHIENASFVSYLERRAAELDIKIIDQPVVNIQVAENGYIHQLKLDDGTTLAGDLFV
DCSGFRSTLLGEILQEPFCSFSSSLFNDSAVTGTWMRDDVIYPFTTAETMQAGWCWRIDLPEQVNRGYVY
SSAFISDDDALAEMKRQNPLMGDDHHSVVRFKSGRHQRFWVNNVVGVGNASGFVEPLESTGLHMIGETIK
CVCDVLIDSDQQPTPGLINLANQAIAEKWDDIRDFLSIHFKFNRRVTSDFWQHCWQQTDIGEAEAVVDFF
QNNGPSPIGQLLLRKNSVFKYNGYLNLLMGQQVATKYQGNNEILDLDNWRQVKNYFLKNCDNALPIHEAT
QVVKERKCQWLSS
111) Dsg114 from Nonlabens sp. 1Q3 GenBank: WP_124981671.1
MKIYIIGGGSSGWMTATTMLTKFPDADITVVESPSKPPVGVGESTTQYFRIWADYVGLKDEDWMVACDAT
YKISVRFSNFHDVDDTPWQYPFGSPNYNLAHPDVWFWNQYKRGWSNDKFARDYWIAAECAEHNLLPIKDP
NFKIKKNTGFHFDAVKFAEWLRDNKCQSVKRIIGTVDDFERVGDDIKYLWIDEKQHEADLYFDCTGFTSL
LNNSEWLDYSDWLPNDTAWVTRLEYKDKQEELKSYTQCTALSSGWVWTVPTFARIGTGYVFSSKYQDHQS
ALKEFASFLKYDTEEFRKIHFKTGRKKEIWCGNVVSIGLSGGFIEPLESNGLLSVHEFLLKFCRMWKPRT
TQMMRDTYNKAVAFAFDGFASFVALHYALTQRQDSDYWKAVSQIRYPDGNMIEAAKITMLEESHNFGTKL
NWQNADGDSLYCVMAGHGWNPFTDVIESEILFHGGIPEDSHLNSWTHQWNHARLGVNPLDYYNRTLYAV
112) Dsg115 from Actinosynnema sp. ALI-1.44 GenBank: ONI77922.1
MDHKELAAGMGAGHRTELHAVLESLGESEAAAVRSWLGGGETPDPLALLGELAPVPSDLSRPDDADPQAI
RRIGVIGGGTAGYLTALALKAKRPWLDVTLVESRQIPIIGVGEATVSYLTLFLHHYLDIDAEELYRCVQP
TWKLGIRFDWGPHPDGFMGPFDWSADSVGLLGALAATGNINGSTLGSAMMVADRTAVFDVDGRPVSLMKY
LPFAYHLDNGRFVSFLTDLARRRGVHHVEATLADVVVSGAEWVDHVRTDDGRELRFDMYVDCTGFRSRLL
GQALGTPFTSFASSLFTDSAVTGNIDHGGHLRPYTQATTMNAGWCWRIPTRESDHRGYVYSSAAISDQEA
ADEFARRYPGVDGLRQVRFRSGRHEKSWRGNVMGIGNAYGFVEPLESTGLLMIAVAVHSLVSTLPGSWSE
PSPRELVNAGLGQQWNAIRWLLAIHYRFNTRLDTPFWKEVRATADVSGFDTLLEVYAGGAPLSQRHVLVQ
DVLNRIAPTFFGLFGIDYLLLGQQVPTRRMPLAEPIERWHARKHAADALVAAALPHREALDAFDAHPELN
KQLLEDTDSWAGRSIAKRVGLL
113) Dsg116 from Nostoc calcicola GenBank: WP_073644584.1
MEKTIHNVVVFGGGSAGFLSALALKVKMPALNVVVVHSTTIPIIGVGEATTAWIPWFLHKYLELNREQFY
EETQPIWKLGIKFIWGDSSQSHFNYPFVTHLADKLSVLSKSTAYYCLDSTTESSLYSLLMEQCKSPCFRR
ENGDFVVDERFGYHIENVSFVSYLERRATEIDIKIIDRPVVNIEVAENGYIRQLKFDDGTMLAGDLFVDC
SGFRSALLGEILQEPFCSFASSLFCDSAVTGTWMRDDAINPFTTAQTMQSGWCWQIDLPDKVNRGYVYSS
AFINDDDALQEMKRHNPLMSDRHSIVRFKSGRHQRFWVNNVVAVGNASGFVEPLESTGLHMIGETIKCVC
DVLIDSDQQPTPALINLANRAIAQKWDDIRDFLSIHFKFNHRVESEFWQHCWHQTDIGDAEAIVDFFQSN
GPSSLGQILLRPNSVFGYNGYLNLLMGQQVATKYQSHNDILDLDRWRQIQNYFTKQCANALSIHEAIQVV
KERKCQWLTS
114) Dsg117 from Nostoc sp. ‘Peltigera membr. cyanobiont’ 232 GenBank:
WP_094340898.1
MIPKFHEACILEYRTILIDSFIHVEKTIHNVVVLGGGGGSAGFLSALALKVKMPWLNVVVVHSTNIPVIG
VGEATTAWIPWFLHKYLELNREQFYEETQPIWKLGIKFIWGDSTQSHFNYPFVTHLADKLSVLSKSTAYY
CLDSTTESSIYSLLMEQNKSPCFQRENGDFVVDERFGYHIENTSFVAYLERRAAELDIKIIDKAVVNIEV
AENGYVRQLKFTDETTLAGDLFVDCSGFRSTLLGETLQEPFCSFSSSLFCDSAVTGRWMRDDAIQPFTTA
QTMQSGWCWQIDLQDKVNRGYVYSSGFISDDDALQEMKCQNPLMGDEHNLIRFKSGRHQRFWVKNVVAVG
NASGFVEPLESTGLHMIGETIKCVCDVLIDSDQQPSPGLINLANLANRAIAQKWDDIRDFLSIHFKFNRR
VESKFWRHCWHKTDIGDAETVVDFFQNNGPSPIGQILLRKNSVFGYNGYLNLLMGQQVPTKYQSDNDTLD
LDNWRQVKNHFIKNCANALPIQEAIQVVKERKCQWLTS
115) Dsg118 from Cellulophaga sp. W5C GenBank: WP_077399145.1
MTIHFIEYEESKICQSIIKQLQEKYNFSCCLTKDLGCVKNNDLIIWFVQNENLESVLNTCANIRKHLPDT
TILFVSAFECDKILIGPIYSPNNTSGLDSALFFLYQEKCEDINSKLKLKLPLFKDILGEEFYIKRIHKLT
QKLAEKINEFKNVSQNKNSINKIEIYNIKESNFDERFVYPILEIKEDFYEKKKNSQLIQDINFINASKKD
FRFKLLNKSTLNKTVAIVGGGTAGYLSAISLKTKHPELEVTLIESEKIPIIGVGEATTPDLVDFLFKDLK
LDKLDFYKKVEPTWKLGIKFYWGESGDYTFNYPFGEHDLVSGYINGNIDHGSLTSILMSQDSSFILRKNE
KDFYSLTNPRRIGYAFHLENRKFVTYLKNKAIELGVVRLQNTIDKVILNDSHNQVSSLITSDGKKLQCDY
YLDCSGFKSLLIDKLDSQYFSYNDNLITDTAISFNVNHKGEIKPYTYAESMKNGWCWNIPLRDSDHRGYV
YSSKLSSENDIIDELKLKYPNLTDYKVIRFKSGRHNSFIKGNVAAIGNSYGFVEPLESTGIHMITEHIKI
LTKSFDALINDRTGTLKGHLNRHIANKWDYLKWFLSIHYKYNKKFDSPFWEFCRNEIDVSKYQHILDLYK
SDGPLQMLNNSLSDSLRFDFVDSLFGLKGVDNILLGQGVIPNSIDDIQNVGHELWKYNVNTWMNLSKRTI
PLKEDIEILVQNPNLI
116) Dsg119 from Flavobacteriales bacterium TMED113 GenBank: OUV52442.1
MKKVNKLVIVGGGTAGWITASWFSRRWGSKIDVTIIDKYQPERVGVGEATLLSFPSVMQKMGFRVEDWVK
RIDATFKAGILFPGWGREDKVIWHPFGFTSIGDNKVPMYDIWSNYQSKYDVKEISPLYRTAMGNKIELDY
IKDTYAYQIDCGKLVTFLHDNCNKICNYIQSDVKTVVKVDDDVEKIILEDGSEIKADLFIDCTGWNQLLI
GKEDNVDLSDRLFIDSALAARVKYENPDKEMHPYTDCQAMEHGWRWRIPTRSRIGTGYCFNKNITSPDEV
AKQFSEHWNGRIKPEDMRLLDWKPQMIDKFWKGNVVSIGLSAGFIEPLESTGLAMMIRGCEYLEESLYGC
IYNPVFEPDIYNIRMKASFETAVDYVNMHYSYSERKGKFWDYVRLSHEKSGMQILMENQILDPNNETLQT
DKISSFFGGTNWHIWLLQLMPEITKKTYWYPDTVDILSRFEKYIQTLDNNVKEATPQKILLKEWYG
117) Dsg120 from Flavobacteriales bacterium TMED113 GenBank: OUV52443.1
MKVKDIVIVGGGSSGWMAAAAISRCNDVKVTLVDKEVPTPLGVGEATLLSFEKFMVEQCGFNPNEFLGEL
DAGLKAGILFKDWGHKGNEIWLPFYWLNYPFTDPPVSMVDAWSTSQDIDFKKLEVLYQCSMDNIIDRTQI
GEGYAVHIDCIKLIKYIKEKISDRITYVNSSVKAYLGGNTLYLENGDKIEADLFVDCTGFKSILKRKRDR
VNLSDRLYVDTAVAGPIEYEDKHNEFRPYTTTTAVYDGWIWNTPLQSRIGTGLVFNRNITPIDQAKEYFC
SFWDQRTTPDKLKVIDWTPYYDTNQWEGKVVSIGLSAGFIEPLESTGLGLIIEGIKTLSKLLNDGFCNEY
DVNYYNNHMTLAYEQCVDYVNCHYSKSNIKSPFWDYVRDNYKMSEAQEVFLDEMSSENKTIMPGGKGFIF
GVGNWIHWLIQAGYPLEPRSWMKHDKMDESLNHLIECEDKKIELGTDLMGHNEFADKFL
118) Dsg121 from Chromatiales bacterium RIFOXYA1_GenBank: OGO75298.1
MVPYGYHLDAAMLARFLKRKATEAGVEHIEDTVTDVTVSDGNITAVTGVKASYSADVFIDSTGFRSLLIS
KLKADNWQSFSDALPCNKAVAIQRALPQGHSPNPYTVATALSNGWVWQIDLTSRQGTGYVYDGNRLSKEQ
AEQELRDYLGWHSDVIKCIHLDMNVGCRKEFWVGNCIAVGLAGGFIEPLESTGLHLINLGARLLGTHLMQ
PHPTQAVKDAYNKAMNGFYQDLKQFIVLHYCLSNRTDTEFWREAPAKAQLCEGLPEKLELWKHKICEYHD
LAGGYATTFVDENYRYILYGMQHYPALQYHSAETDKEVFARLQQLSDKAVEMTLPHVEFLQKIAAVR
119) Dsg122 from Pseudogymnoascus sp. 23342-1-I1 GenBank: OBT65220.1
MTVPTKCTVLVVGGGPAGSFAAAALARESYEVVLLEADKFPRYHIGESMLPSMRYFLKIIDFYGKFNEHG
FTRKNGAAFQFNRSQPEAYTDFIAADENGYAWNVVRSEADDMLFRHAGACGAHIFDETKVMAIQFAEVNG
LAAINGSNGHAEKKIGKPVSATWTRKDGTSGTVSFDYLIDASGRQGLLCTKYLKNRTINPNLKNIADWGY
WTGGAKFAPGTRMEGAPYFEALEDGTGWGWYIPLHNGTVLAKKKQMASPSSKDFYISWLGLAPEIKKLLV
HATLDGNIKSASDWSYHASTYAIPGARICGDAGCFIDPLFSSGVHLAVLGGLSAAVTIAAVKRGEVSEER
AMSWHSKKVTESYMRFFLVVSTGVKQIRSQDAPIIRDNDEVGFDRAFDIFKPVIQGRADADSTGTLSTED
IHKTIEYCFNALMHISPNNALIDKLKSVYDLGGNDEIKAKAITDLKKTPTVEESQELKYILGFVEDMFTI
DNFTLNSIDGLVPRTERGMLDLEVAHNAAYHRY
120) Dsg123 from SAR202 cluster bacterium Ae2-Chloro-G2 GenBank:
PKB60447.1
MQKVSDVDILVIGGGPAGSTAASMAAKYGLSVKICEKSKFPREHVGESLLPASIPILEELGLGEKIKKAG
FLPKYGATMVWGRDKTPWSWRFSETNKQNTHSYQVSRPIFDEILLRRSEELGVSVEEEATIDKVNLEESN
RGAFVTSLNKGQYFQPANFIIDASGQSALIARSLKIREWDESFHNLAVYGYFSGATKLETPDENNIFIES
YQNGWVWSIPLADGTTSVGVVVDSKNASTQLQKTDPTAYLLSELSLSPKTSDMLLNSNLTTNAKVVKDWS
YTTSKMAGNGWALAGDAACFIDPLFSSGVHLAMMSGVLSSAYAVTYLKDRILGEESASVYETTFRQEYDH
FRDLALLFYSSNRTVDSYFWEARRLFKEENYFSDRTSFIRAVSGQSVRGYERVALERGELPNEFMSAINL
HNEESEKRNAHLLKIQNSIQMQVPTLSNEVKLEKKPVLSEGEFQWGTVITTPFRKEGVPCSNLVANLLMK
IDGKKSLIDIVDDLSRSASESAKEKLLKYSIDTISILYVEGVIDNLS
121) Dsg124 from Talaromyces marneffei ATCC 18224 GenBank:
XP_002151004.1
MAIPEKTTVLVIGGGPAGSYCASALAREGIETVLLEAEKFPRYHVGESMLPSLRHYLRFIEADKKLDAHG
FIRKNGALFKLNSKPAAYTDFVGAGGPNGFSFNIIRSQADDLLFRHAGTSGAKIFDGVKVNSIEFVPSGL
PRSDDPDCEIPDPGRPVSASWVNKDTGDAGSIKFDYLVDASGRQGLVSTKYWKNRKMNTGAQLQSVATWG
YWTGGGIVEKGTSREGCPYFEAIADASGWTWYIPLHNGQWSVGVVMNQKVLADKKRAAGDGKNVYLQTIR
ETPGLQALLENGELVTELRSASDWSYNATAYSSPYLRVAGDAGCFIDPFFSSGVHLALTGGFSAATTICA
SIKGQTSEIGAAIWHTKKVSESYTRFLVIVSTALKQINEKDEPVISDFDEKTFERAFKHFRPIIQGTVDV
QGKLSQAEVSQALNFCFRAFHQVDSKEKQNLIEKMRSLAISDPDDLSNEKYSAALKELEAVLTPDQLHIL
QTIRARQMLRPEDMFTVETIGSDVIDGLSVNMVTGQLGLVHPGKAFKVAPSNKDILALLNGEELSESSIG
FKTDPGYQNPTAAAH
122) Dsg125 from Aspergillus luchuensis GenBank: OJZ87639.1
MTHAYCKYSECTVLVVGGGPGGSYAASVLAREGIDTVLLEADVFPRYHIGESMLPSLRHFLEFNGALPEF
EAHGFNMKKGAAFKFNSKPPGYTDFLKAGGHHNYTWNVLRSEADSILFHYAGECSCKTFDGVKVTSLEFR
ATEPSVNGNVGFPESASWTRRDKSTGSIQFEYLVDASGRAGLMSTKYLKNRRYNEGLKNTAIWGYFKNAA
TYGVGTSMKGSPYFSLLEDASGWTWAIPLHNRTTSVGVVQHQNSVKAKKQAMGSPSSKDYFLSCLHEVSG
IMDFIEGAELVSEVGSASDWSYNASSYAATNVRIIGDAGCFIDPLFSSGVHLALLGALSAAATICASMKG
QCSEQAAGEWHSEKVREACTRFLLVVSSAYAQMVHKDRPVLNELGENSFDRAFDIFRPIIQGTVDANGKI
AEKEVQESIEFCVRVLQKIDHEQSGVDTESARAGHIFQQDELENMKHIIMNSNETFTLDSFGADIIDGMT
ANIKRGSLGLEIVGDTCSHDNFL
123) Dsg126 from Ophiocordyceps sp. ‘camponoti-saundersi GenBank:
RDA92919.1
MSIPDTCTVLVVGGGPAGSFAAAALAREGIDVVALEMEKFPRYHIGESMLPSMRHFLQVIDFYDDFNARG
FTKKVVSPISLLVKKTSSACQRILAYQLTTCLPSRTARHSVSIRLNPMPVQLDFLAAGGPDSHAWNVIRS
EADEMLFKHAIASGARAFDDTKVDAIHFTNGVGGSEESKLGRPTSAAWTRGDGSSGTISFEYLVDASGRN
GILCKRYYKNRKVNDNLKNMAIWGYWKGSDTYGSPGTRSENMPYFETLQDASGWCWHIPLHDGTHSVGIV
LNQDLATKKKHELGSPQTKDFYLKSLQLVPRTSQLLSQAELVSDIKSASDWSYCASAYAFPYVRIIGDAG
CFIDPYFSSGVHLAVMGGLSAAVTISASIRRDCDEETAASWHSKKITESYNRFFMVVSYMAKIMFSKNEP
EIEGTYNEGVQNAFDILQPVLQGTTDANTSGNISLVEMFKMFKFILVALTGSSTEQVDDLVAKLEAPGFD
AETDPAVTEIVKSFQESLSIEESHVFDLLQNMRWYLQDYYTIDSFTLNPIDGLVTCMERGKLGLVSADKK
KAGKSLACRVESSARQACDEVN
124) Dsg127 from Bacteroidetes bacterium GenBank: PTM08497.1
MNKFYDAIIIGGGPAGSTMASKLAEKGQHVLVLEKAKFPREHVGESLLPFLYHLFEELGVLDEMKARFSR
KPGVTFSNIDGTEASHWCFKHVIKDESGLSFHVRRAEFDDMLLQNSRKKGAEVMEEVSVQKVDLDIDPNQ
ATVYAENAQGEQLQFTGRMVVDASGQNTILATQMKTKKPFESLTPRVAYSSHWENAKLTPELAAGNIKIV
HLEGEKMGWFWMIPLIDRLSVGVALNMSYANQQRRILKETTTDWQAKLYEQELQESLVAQEVLAGATRMG
PVMANGDFSYYSSTKWGTNFVIVGDASGFLDPIFSSGIYLGMKSSLLVAEGITDMLGGNGTATIETAYSD
IQGAYKLVEKLINTFYEPGSIKWDQAGSAFDLSYKKFETAYSILHLILAGDFFKNHAKYFKAIDILRTPQ
KIEQYKHLIGHDEPTMEQRVCIA
125) Dsg128 from Sorangium cellulosum So0157-2 GenBank: AGP37469.1
MQGHSVLLLEKEKFPRHQIGESLLPATTYGICGLLGIRDRIERAGFTRKQGGTFRWGKSPEPWTFRFAEN
PRVPGGYAFQVERSVFDKMLLDAAREKGVDVREEHAVVRVEQEDGRFSRVRFRDDRGSERTATAKYIVDS
EGHRGQTYALVGERVFSQFFQNVALYGYFLDGKRLPAPSSGNILCAAFRDGWFWYIPLSDRLTSVGAVVS
REAAQRIQDGPEQAFQSFVDSCPIIAEYLASATRVTEGVYGEFRVRKDYSYCNTRFWKPGLVLIGDAACF
IDPVFSSGVHLATYSALLAARSINSCLAGDIDEEEAFEEFEFRYRREFGNFYQFLLSFYDMHQEADSYFW
KARKVLNTDEKANDAFIRLVAGASSVDEPAFNHAEDFFRSRQGMGQWLEGMLSNQLAMQVDGLPGQSAPA
TLEGGPDAEQFMEGFTAEVRQIQTQAMFGHRRARESSVRPQGLIPSTDGFAWQRG
126) Dsg129 from Acidobacteria bacterium GenBank: PYV68218.1
MKMKTDVLIIGGGPGGATAAMLLIREGIKPIVLEQETFPRFHIGESMTGEAAQLLRRLGLEEKMLSANYP
VKHGVKVYGADGVNAWFIPVCARTPDWKLTPGTTWQVRRSHFDGMMLDEAAKRGANVIRGKAVKPLLGED
GSMRGVTMRRPDGSHEDIEAEVTLDCSGLATFLANQRVTGPKYVGNYDKQIAFFSHATGAVRGSASSGED
AKDNTLIFYLKKFHWAWFIPIDDEVVSLGLVVPTATFQESRQTPEEFFRSTLPGINPALARKVSDIQLVE
KVHVIPNYSYQVRRFCGKGFICIGDAHRFIDPIFSFGISATLREAEFAVPHVLAYLGGKGRDLANPFAEH
MLFCEKGTDNLEDMVDL
127) Dsg130 from Verrucomicrobia bacterium GenBank: PYK21723.1
MKMKTDVLIIGGGPGGATAAMLLIREGIKPIVLEQETFPRFHIGESMTGEAAQLLRRLGLEEKMLSANYP
VKHGVKVYGADGVNAWFIPVCARTPDWKLTPGTTWQVRRSHFDGMMLDEAAKRGANVIRGKAVKPLLGED
GSMRGVTMRRPDGSHEDIEAEVTLDCSGLATFLANQRVTGPKYVGNYDKQIAFFSHATGAVRGSASSGED
AKDNTLIFYLKKFHWAWFIPIDDEVVSLGLVVPTATFQESRQTPEEFFRSTLPGINPALARKVSDIQLVE
KVHVIPNYSYQVRRFCGKGFICIGDAHRFIDPIFSFGISATLREAEFAVPHVLAYLGGKGRDLANPFAEH
MLFCEKGTDNLEDMVDLFWEQPFAFATFVHHRYREQMIDAFAGRVYPSEQQPSPAILAFRKMLKRTRDYE
HEDDYSIPIGSRFHPERAAIWEPNSPLPATEEWMFAHSS
128) Dsg131 from Penicillium nordicum GenBank: KOS43943.1
MSIPTKATALVIGGGPGGSYAASALAREGVDTVLLEADVFPRYHIGESLVASIRPLLKFIDLDDTFVNYG
FVRKNGAAFKLNNQKEAYTDFILDPGAGTYAWNVIRSECDELMFKHAAKSGAKTFDGAKVTSIEFIPDET
NVESPGRPVSASWKTKDGRTGIIDFQYLVDASGRAGITSTKYLKNRTFNSYLKNVASWGYWRGATPYGVG
TPVEGQPYFEALQDGSGWVWFIPLHNGTTSVGVVMNQEMATKKKKVSSVTSSQAFYLESLEGARGISRLL
EPSTLEGDIKQASDWSYNASSYGSSHLRIVGDAGAFIDPYFSSGVHLALSSGLSAATSICASLRGDCEEE
AAWKWHSQGVANRYGRFLLVVLGATKQIRARDTPVMNKDGDEGFDDAFTVIRPVIQGIADVPGRTTHREI
LDAVAFSTNVVGPDIEGTEQAWVEKDHGALSCEEEEVGRVMNNLAKAYKAQDVYEGLTARLERGALGLQV
AN
129) Dsg132 from SAR202 cluster bacterium Io17-Chloro-G4 GenBank:
PKB66002.1
MSQTASPYDVVVIGGGPGGSTAATMLARQGLRALLLERDHFPREHVGESLLPASIPVLEELGALPAIQQA
GFLQKWGATMVWGKDPEPWSWYFKETNPKYPHSYQVSRPEFDHILLDNSRQAGVEVREGYRATRVTFEGG
RAVGVRCESSTKEPLEIAAGFVVDASGQGGLLARQLGLRQWDPFFRNLAVYGYFQGAQRLPEPDETNIFI
ESYPQGWLWTIPLHTGLASVGAVVDSETGQEGIRRLGPRGFLMDQLSQGPATAEMLRKAELSSGPDVVRD
WSYVCKKTAGPGYVLVGDAACFVDPLFSSGVHLALMSGVLAAALVTSSLSDPDIEEAAGQVYQELYIQEY
NQFRELARLFYSSNLSSDSYFWEARRLTGKDAAFTPRQAFIRTVAGQPPRGYERAVLEHGDAPSEFISSV
GQVETDRARRQADLSAFLDPSGAMHHMFYSAVPSLAPGVTVVRKPVLGEGRFDWGNVIVTPSQPEGTPCS
ALVAEVASAIDGRTPVRGLMAKLQEDRDPSSAPIIEQTVVSAVQILYVDETISELISQ
130) Dsg133 from Trichophyton soudanense GenBank: EZF74478.1
MSIPASCTALVVGGGPAGSYAASALVREGVDVVLLEADVFPRYHIGESMLPSIRHFLRFIDLDSKFDSYG
FVQKNGAAFKLNSKPEAYTDFIAAGGPGSYAWNVIRSEADHLIFKHAGENGAKTLDGVKVNAINFEPLSE
ENSDPVSTDLGRPVSATWTRKADKSSGVIKFEYLVDATGRAGLVSTKYMKNRTYNQGLKNVAIWGYWKGA
SSYGIGTPREGDPYFEAIADGSGWVWLIPLHDGTTSIGVVMNQAMATTKKREAGSSSQQFYLDNVKQIPG
IWQLLDNAELVSDLKSASDWSYSASSYASPYLRIAGDAGCFIDPFFSSGVHLAFASGLSAALSIRAAQRG
DCDEMAAAEWHSKKVAEGYTRFLLVVMSALKQISDRDEPVLTDWDEESFNRAFDLFRPIIQGTVDVDKTL
TQAEIAQTINFCVNAFQNAGREEQDALMNKIKSVSETKNGEETDVVKKLKESLSADERRTLNTIQARQII
RSEDTMNIDNFTVDVIDGMVPNLKRGSLGLLRYVPKVKAGQQEDELRAKLGLPEKQESIFSY
131) Dsg134 from Trichophyton violaceum GenBank: OAL70258.1
MVGLVAIISVWWCVRPKPNKIPIIGDAKNQNFMAALEEGSRKQYPESCFRIPTRDIPTIIVPRKCLSTIA
YAPEHRLSLGREVYERLMGRYTKMVKSDHLAEFVRGGLSKQLGANISLLQEDAIWTISSQIGNCPEWKPL
QLFPAMVKLVPLHIGRTFINSPLSREQEWIDLTLEYAISTVTIAAKMSNTHWMLRPFKALFLPEIGEMSQ
QFKQASKLLSPVLNARLLGDAPGTKDLMQWMIDNYPGQSNNLTLHTRLQLEAVQAATYNLAFQLIHFFFD
ILAHPEYIEPLRIEIQTVFDSCGRTWTPAALAELRKCDSFLKESQRLNPIGIVSVSRFALSKFDLPDGTT
VPAGISVSAPAMTVNTDPSLWECPTQFDGYRFEKLRQIKGNEYKYQFSSISASELNWGYGTHSCPGRHFA
SNQVKVIIAELLMKYDFRFEENIQDNQTPKRPANNFDGVRIMPNPEARIMIRSREVGAICSVPEERDRGK
GDRIYRASNHSRVNGTNKSFNFTEEANMSIPASCTALVVGGGPAGSYAASALVREGVDVVLLEADVFPRY
HIGESMLPSIRHFLRFIDLDSKFDSYGFVQKNGAAFKLNSKPEAYTDFVAAGGPGSYAWNVIRSEADHLI
FKHAGENGAKTFDGVKVNAINFEPLSEENSDPVSTDLGRPVSATWTRKADKSSGVIKFEYLVDATGRAGL
VSTKYMKNRTYNQGLKNVATWGYWKGASSYGIGTPREGDPYFEAIADGSGWVWLIPLHDGTTSIGVVMNQ
AMATTKKREAGSSSQQFYLDNVKQIPGIWQLLDNAELVSDLKSASDWSYSASSYASPYLRIAGDAGCFID
PFFSSGVHLAFASGLSAALSIRAAQRGDCDEMAAAEWHSKKVAEGYTRFLLVVMSALKQISDRDEPVLTD
WDEESFNRAFDLFRPIIQGTVDVDKTLTQAEIAQTINFCVNAFQNAGREEQDALMNKIKSVSETKNGEET
DVVKKLKESLSADERRTLNTIQARQIIRSEDTMNIDNFTVDVIDGMVPNLKRGSLGLLRYVPKVKAGQQE
DELRAKLGLPEKQESIFSY
132) Dsg135 from Agaricus bisporus var. bisporus H97 GenBank:
XP_006454183.1
MPNAQLPSRTTVLVIGGGPAGAYAASALARENIDTIVIEAAKFPRYHIGESMLPSLNSFMRFIGAEEKLR
DHGFTTKLGAAVKFNQHKKEGYTDFTRGDVRNASCNVIRSEFDNMLLRHAEESGARVFEETKITDIEFET
NGAEMRPTSATYTRKNGEVGVVHFDYLVDASGRNGIVSTKYLKNRKMNQSLHNLACWGYWTGQKQYMPNS
SRHNAPWFESLTDESGWAWFIPLHNGTVSVGIVMDSSISAQKKAEGRKATSDGNYTLRDHYLDQIQLVPG
LKAFLEEATLKEDGEHYVIRSAADYSYAADKYAGDHYRIIGDASAFIDPFFSSGVHLALLGGLTAAASIA
ASIKKQCAEEVAWKFHDVKVATAYTRFLLVVMSAYKQIRNQSVAVLSDVDEDNFDRVFDIFRPVIQGNSD
VGKNLSENELERTIDFCKDIFAPTDPEMIEAVGARLRPELLAANSPILTNEEINIESQGDDEARIVLHRL
NARKPVNQMYQGPDNLQVGDVGGYVAHIQVGALGLVEVAST
133) Dsg136 from Coprinopsis cinerea okayama GenBank: XP_001838319.1
MGRTSPSSLRTQVLVIGGGPAGAYAASVLAREGFQTTVLEATKFPRYHIGESMLPSVTSFFEFIGLDEKL
RNHGFCSKPGAAVKFNQRKKEGYTDFLKNNSEGTWNVVRSEFDEMLLRHAGESGATVLEEHKVIEIKFED
VSGKSRPYSAVFTRPSGERSEIHFDYLIDASGRNGIMSTKYLRNRKMNSSLHNIACWGYWEGGYGKYMPG
TRRENAPWFEALTDESGWAWYIPLHNGTVSVGVVMDQDVSSSKKAKAREASATGEHTLCDHYLQQLELVP
GLKALLGTATLVSNHVKSASDYSYSAERYAGDRFRIIGDASAFIDPLFSSGVHLALLGGLTAASTVAASV
RGHCSEEEAAEYHHVKIGAAYTRFFLVVMSAYRQIRSQNVDILSDVDEDNFDRAFDIIRPVIQGTADVGR
TLSESELQKTLDFCKDVWAPVDPEMHERVASRYGSELLSPAAPIFKPEDLDQIVDPNDEDAVDVFKRANA
RKIVDPMFKGISSLESEPVKGFITCLQRGSLGLIYIASAA
134) Dsg137 from Melittangium boletus GenBank: WP_095982085.1
MLNIPASTKVLVLGGGPAGSTAASFLARAGVEVTLIEREMFPRYHIGESLLPSCLEIADLIGARQKIEAK
GFVKKPGAYLEWGREKWSLDFGELQGQHTYSFQVDRSEFDELLLRHSEEQGVRVFEGVEVKSIENNAEGR
PVKAVWAVHGDESQTGEISFDYLIDASGRHGVMSTRYLRNRQFHKVFQNIAVWGYWEGTQKGADYRDGAI
AVGSIPDGWIWAIPMSGGKTSVGVVVHKDSFQAQKREADTAKIYEDAIASCPLIQRVCSGAKLVTGLKTE
SDYSYAAESFCGPGYFLCGDAACFLDPLLSTGVHLAMLSAMLSAAAITSVVSGEVSEQEAQSFFEKSYRQ
AYLRFLVFVSVFYDQRCGKDNYFKEAERLSQYEKDPSRLKQAFLNLVSGLEDLSSAEQATSHLIGEMSRR
VTENLTLRKDKSTLASGSEEIKGRAQDNARFFDGVEGIPVMTPEGAIDGLYVVLKPRFGLGRFVATVEAS
SIVNVKKEEVRL
135) Dsg138 from Halobellus rufus GenBank: WP_049984930.1
MAGSTISMILAKNDLDVLLIEAKKHPRFAIGEAMLPLSAVWMWIVGEYFDVPEIQHLSDANRIVDNVTES
CGVKHSVGFAYHERGQPFSGEHAHQLVPPEMPFYKESHLLREHVDHYLVESAGSYGVEYVDETPITDVEI
DDDEVTVTTDRGTTTGAVFVDATGGNSILAEKRGYRDETPDLETDTRAIFAHVEGLEPFDELIDEEDRPG
QTNRLHDGTLHHVFEGGWLWVIPFDNFDRSTETKASVGLMLDRNTRPRDESLSAEEEFHEIISAYPDVER
HLGPVEPVMPWIRTGRLQRSASESSGHRHLLTNHTYGFVDPLYSQGMVHTFESVFQSAKLLLEAFEVGDF
SAERFAPIDDLHRRQLETADLLVSNAYTSMDEFDLWNAWTQLILVESVFPDLYIQRHCLKYLSSGDPAEL
DRLLRETRPGDDAPFAPEKDALLDRSSAVLDAYTAGEISAGTAAESLFDAMKRADWLPRSVYDWGNEDER
HIDFADPAVTGELLAWGRTDAPAHIREGLFDFEMPEMP
136) Dsg139 from Chromohalobacter japonicus GenBank: WP_075368400.1
MHTEASLQAADCDVAIIGAGPAGAAAAARLSRLGWRVHVIERSHFPRFSIGESLLPQSMAYLEAAGLLET
VQAGGYQPKNGAAFTRHARTTTIDFREKSTPGWGTTYQVPRADFDQRLIHAAEAQGATLEFGTTVTAFNA
DAARPVLQLEDEQGTTRHLSARFVLDASGYGRVLARLEALERDPRAEPRMAIFSHVEDGIEDADYDREKI
LIGVHPEDAGIWYWLIPFADGRASVGVVGDIETLTAHGDSPEARWQALLDQEPRFRQLLHQARRVREVNE
IRGYAASVTRLHGPGYALLGNAGEFLDPVFSSGVTIALHSAHLAAPLIDRQLHGEKIDWHADFETPLRAG
VDTFRAFVEAWYAGTLQTIVFHEAPPPRFKRWISGVLAGYAWDRDNPFVTASRRRLATLAEVCAQRDEVR
S
137) Dsg140 from Photobacterium leiognathi GenBank: WP_060988050.1
MLNNRQRTQVAIIGAGPSGAVAAALLNQHKVDVVVLEKNTFPRFSIGESLLPACMEVIKKANMVDAVNAA
DFQYKNGAAFRRRDTYTAFDFRDKFTDGAGTTFQVQRGNFDKVLADEAAKQGVEIRYQHNVEAVDCGDST
SVLTVRDEVSDQVYQLEADFILDASGFGRVLPRLLDLEQPSCLPVRHAIFTHVVDHIEDSGVEHDREKIL
ISVHPTNEDVWFWLIPFSNGTCSLGVVAEPAFLAQYDADEKTALQQIVAEEPTLNKLLSKAEYSNPAAQI
GGYSANVKNLATNNYALLGNAGEFLDPVFSSGVTIAMQSADFAVNALLKQLAGDEVNWQQDYADKLMVGV
NTFRTYVEGWYSGELQKVIFYTDPEPKIKQMVCSILAGYAWDQNNPFVAQSERRLRTLAEICS
138) Dsg141 from Halomonas titanicae GenBank: WP_083868842.1
MATGAAKQMKTHDTTDVAIIGAGPSGAAAAAWLARRGINVRVIERQRFPRFSIGESLLPQCMVHLEACGL
LDAVQTGDFQFKNGAAFTWRDRYAAIDFRDKFSPGPGTTWQVERADFDQRLIDGARQAGASVEFETQVEA
FVADHDRPSLTLVDANGEQRSLQARFVLDASGYGRVLARLTGLARPSTLESRCALFTHIEDRIDCSHYDR
DKILIGLHPEHSGIWYWLIPFSQGRASVGVVGDRATLEAAGVDDKERLWHFLHAEPRLNKLLVNAKAIRD
IGRLEGYSADVEQLHGPGFALLGNAGEFLDPVFSSGVTIALDSALRAAPLVERQLAGEKIDWDSQFEQPL
RRGIATFREFVDAWYDGRLPRIIFNDQQIPRIREMISSVLAGYAWDEENPFVAASRRRLHSLAEACSDIS
SHATGEG
139) Dsg142 from Myxococcus xanthus GenBank: SDW40578.1
MSGAWEGKLYDVIVMGGGPAGATLAARLRKDPGLSVAIFESERFPREHIGESFVPSAVSSLQESGALGRV
LSSDCWIKKGGGYYSWDAVRPWSTFFEHKAYERDGYRRWAFHANRAELDDILLRHAEENGAEVFEGTPVK
QVYRRDGFTEVDLGEKGSARCKVFVNASGRYSVTSLGGPREFLSSYRNIAIWSYIRKGKPAQSLPGDWNI
FRESGVSPIGSFAFEDGWFWYIPIPLEVDGRREVVHSLGLVTDPRGLKSKRDYMSPSVFMETARKVPFLC
DLVADAELIYDEFRTTANYSRISHQMCSWENREIRVGDAAFFVDPLFSTGVHFALHHTAAAAVLVRAAFD
EAMPEQHREDLWHDYDQMLRKQAQVFSLAIDQWYNEISLAHPGSVYWRERSERATFEVRNATFHYLVNGS
LDEDLLHVISQGNDAVEALSETGAWRTSFAQLQRLRPADDALVQLMPNVKFRQSVTLEHPIADSAEDKLD
ARPQAFDHGPYWESPERHAHEVAPRFGRPSPCLRFYFEDGDHQDTVRILWNRPNSALLERLSQPHAYGPL
LAGCSLSERGLLDQLLLKGMMRVIP
140) Dsg143 from Pseudoalteromonas phenolica GenBank: WP_058028750.1
MDQFKSYDVVIIGSGPAGSLCGIECRKKGLSVLCIEKDEFPRFHIGESLTGNAGQIIRDLGLADEMNAAG
FPDKPGVNVIGSLSKNEFFIPILAPTWQVRRSDFDNMLKRRALEHGVEYQQGLVKDVIKHEEKVVGAIYK
ADGVEHQVRSKVLVDASGQNTFLSRKGIAGKREIEFFSQQIASFAHYKNVERDLPPFSTNTTILYSKQYH
WSWIIPISPDTDSLGIVIPKDLYYKECKNPDDAIEWGMEHISPEIRRRFKNAERVGESQSMADFSYRIEP
FVGDGWLCIGDAHRFLDPIFSYGVSFAMKEGIKAADAIKRAIDGNDWKTPFYEYRDWSNGGQQIAADLIR
YFWIYPIFFGYQMQNPDLRDEVIRLLGGCCFDCEGWKAPTIFRNAIEEYDRKQMAG
141) Dsg144 from Acinetobacter baumannii GenBank: SCZ10544.1
MGDYDFDVGIIGGGPAGSTMASYLAKAGISCAVFEKELFEREHVGESLVPATTPVLLDIGVMDKIEKANF
PRKFGAAWTSADSGPEDKMGFQGLDHDFRAAEILFNERQQEGVDRDFTFHVDRGKFDRILLEHAGSLGAK
VFQGVEVADVDFVKPGDVRLNVKLGNQKVGIRTRMVVDASGRHVLLGRRLGLREKDPVFNQFAIHAWFDN
FDRRSATRNPDKVDYIFIHFLPLTNTWVWQIPITETITSIGVVTQKQNYTKSGLSYDDFFWEAVKTRENL
YDALKASEQVRPFKKEADYSYGMKEVCGDSFVLVGDAARFVDPIFSSGVSVALNSARIASKDIIAAVRNN
DFGKASFAEYEGMIRNGIKNWYEFITLYYRLNILFTAFVQDPRYRLDVLQLLQGDVYSGERLKVLDKMHE
IVATVESDPDHLWHKYLGDMQVPTAEPAF
142) Dsg145 from Serratia sp. S4 GenBank: WP_017891342.1
MTQNSPANGRDSNHFDVIILGSGMSGTQMGAILAKQQFRVLIIEESSHPRFTIGESSIPETSLMNRIIAD
RYGIPELDHITSFYSTQRYVSSSTGIKRNFGFVFHKPGQEHNPKEFTQCVIPELPWGPESHYYRQDVDAY
LLQAAIKYGCTVRQKTKVTEYHADKDGVAVSTAEDERFTGRYMIDCGGPRAPLATKFNLREEPCRFKTHS
RSLYTHMLGVKPFDDIFKVKGQRWRWHEGTLHHMFEGGWLWVIPFNNHPKSTNNLVSVGLQLDPRVYPKT
DISAQQEFDEFLARFPSIGAQFRDAVPVRDWVKTDRLQFSSSTCIGDRYCLMLHANGFIDPLFSRGLENT
AVTIHALAARLIKALRDDDFSPDRFEYIERLQQKLLDHNDDFVSCCYTAFTDFRLWDAFHRLWAVGTILG
QFRLVQAHARFRASRDEGDLDNLDNDPPYLGYLCADMEGYYQLFNDAKAEIEAVSAGLKPTGEAAARIHA
LIDERDFAKQMFGFGYCITGDKPQLNNSKYSLLPAMKLMHWTQTSAPAEVKKYFDYNPMFALLKAYITTR
ISLSRKK
143) Dsg146 from Saccharopolyspora erythraea GenBank: WP_011874512.1
MNTQRHSNDKTPYDVAILGTGIGGSMLGAILARHGAKVLLIDAGQHPRFAIGESTIPYTLLTLRILADRY
DVPEIKALATFTDTSRTIGNTFGVKKHFGFLLHHENEPQDPREVSQFNTPGLLHEAAHLHRQDTDAYLFH
VAIRYGCTARQNCRVAEVEFDDSGVTLETVNGEQFRTRYVVDASGFRSPLAEKFGLREDPCRFKHHSRSL
WNHMLDVTPTDKVLDRPREHRPPVPWYEGTVHHMFERGWFWVIAFDNNKLSSNPLCSVGLTLDERRYPKP
TDISPEEDFYRHAARFPDVARQYEGAKPAREWVSTPRLQYSSSHTVGDRWCLLAHAAGFIDPLFSRGLSN
TAEAVNSLSWRLIRAVKDDDFSAERFEYVDRLQQRLLDHNDELVNAAFISWCDYDLWTAVFRAWASGTNA
GSYRLSKAITEFAKDGRDEHFMALEEPPHLGLYWPDHDGFAKFFESMVSQCDLVEQDMLSPRQAADNIYT
QLREADFVPKHFGFAERGQRFINPTPMRFIKTVRWAMREGDPKLRGLIINNAKEALKARVKGQKLY
144) Dsg147 from Enhygromyxa salina GenBank: KIG13408.1
MTSSTQDVIIIGGGPGGSALGSYLSKAGISNTIFESAIHPRPHVGESLVTSTTRIFQDIGFLETMEREGF
VRKYGASWHPIKRNAELTIEFAEFPQEGIEQDYTYHVDRARFDALLLKHASELGSTVYQGTEVKQVLMEG
DRACGVRVAVAGQTIDVPAKLVVDASGRRAVLGRQLKLLEKDPQFDQFATHAWFENVARSATGRLHDIHI
YFLPVERGWVWQIPITETITSVGVVVEKRDFVQNKGEIEAWFHEMLCSTPDGAVAMQDAVRINEFKREGD
YSYRMSRFTGPGYLMIGDAARFVDPIFSSGVSVATYSAKFASEAIHRVLRGGEDEATAFDDYATTLGAGC
SIWYEFICLYYRLLPLFTLFIQNDDYRMQILRLLQGEVFQREEVTVLDAMRRFISAVEANDEHLMRPYLG
DVDLSVVDELRVPTRAP
145) Dsg148 from Verrucomicrobia bacterium TME56 GenBank: OUU36477.1
MNSITIVGGGTAGLITALILKKRLDVKIQAIVPSNIGIIGVGEGSTEHFDDFRQHLHLDVKDVLRETKGT
LKSGIMFEDWTNKHSRYLHHIHSMWNIKLGLSARNYEYLMINNKGASCFAPMTLFHNEVGLEPSDRLVQY
HFNTFKLNEYLIKLCKENNINIIDDEIVDVNLNDKGIKELKGKKKTYKSSFYIDCTGFKKLLISKLGAKW
QSYSKYLKTNSAIAFPTGDQEDYNIWTLAKAMKYGWMWQIPTYGRTGNGYVYSDQYTNKEEAKKEIEKLL
GKEIEIAKHIKYDPGALDKPWIKNCVAVGLCANFVEPLEATSIGTTIQQAFLLMQYLENYNQQSINIYNK
QVSTVMENVRDFIQLHYINDKKTTNFWKDVNKVEPSDTLKQYMHVWKSGRLLKSTDMESIGHYNLFTLFK
EDNFNLIAYFNGLIDTKLLRNSYNIVNKNLKRYWLENRIEGDMLWRNTDRTRKMSHKKYIQEIHDKN

[0052] The 145 sequences listed above (numbered 1-145) have been allocated the SEQ ID NOS identified in the table below.

| Se- | SEQ | Se- | SEQ | Se- | SEQ | Se- | SEQ |
|---|---|---|---|---|---|---|---|
| quence | ID | quence | ID | quence | ID | quence | ID |
| number | NO | number | NO | number | NO | number | NO |
| 1 | 5 | 26 | 30 | 51 | 55 | 76 | 80 |
| 2 | 6 | 27 | 31 | 52 | 56 | 77 | 81 |
| 3 | 7 | 28 | 32 | 53 | 57 | 78 | 82 |
| 4 | 8 | 29 | 33 | 54 | 58 | 79 | 83 |
| 5 | 9 | 30 | 34 | 55 | 59 | 80 | 84 |
| 6 | 10 | 31 | 35 | 56 | 60 | 81 | 85 |
| 7 | 11 | 32 | 36 | 57 | 61 | 82 | 86 |
| 8 | 12 | 33 | 37 | 58 | 62 | 83 | 87 |
| 9 | 13 | 34 | 38 | 59 | 63 | 84 | 88 |
| 10 | 14 | 35 | 39 | 60 | 64 | 85 | 89 |
| 11 | 15 | 36 | 40 | 61 | 65 | 86 | 90 |
| 12 | 16 | 37 | 41 | 62 | 66 | 87 | 91 |
| 13 | 17 | 38 | 42 | 63 | 67 | 88 | 92 |
| 14 | 18 | 39 | 43 | 64 | 68 | 89 | 93 |
| 15 | 19 | 40 | 44 | 65 | 69 | 90 | 94 |
| 16 | 20 | 41 | 45 | 66 | 70 | 91 | 95 |
| 17 | 21 | 42 | 46 | 67 | 71 | 92 | 96 |
| 18 | 22 | 43 | 47 | 68 | 72 | 93 | 97 |
| 19 | 23 | 44 | 48 | 69 | 73 | 94 | 98 |
| 20 | 24 | 45 | 49 | 70 | 74 | 95 | 99 |
| 21 | 25 | 46 | 50 | 71 | 75 | 96 | 100 |
| 22 | 26 | 47 | 51 | 72 | 76 | 97 | 101 |
| 23 | 27 | 48 | 52 | 73 | 77 | 98 | 102 |
| 24 | 28 | 49 | 53 | 74 | 78 | 99 | 103 |
| 25 | 29 | 50 | 54 | 75 | 79 | 100 | 104 |
| 101 | 105 | 112 | 116 | 123 | 127 | 134 | 138 |
| 102 | 106 | 113 | 118 | 124 | 128 | 135 | 139 |
| 103 | 107 | 114 | 118 | 125 | 129 | 136 | 140 |
| 104 | 108 | 115 | 119 | 126 | 130 | 137 | 141 |
| 105 | 109 | 116 | 120 | 127 | 131 | 138 | 142 |
| 106 | 110 | 117 | 121 | 128 | 132 | 139 | 143 |
| 107 | 111 | 118 | 122 | 129 | 133 | 140 | 144 |
| 108 | 112 | 119 | 123 | 130 | 134 | 141 | 145 |
| 109 | 113 | 120 | 124 | 131 | 135 | 142 | 146 |
| 110 | 114 | 121 | 125 | 132 | 136 | 143 | 147 |
| 111 | 115 | 122 | 126 | 133 | 137 | 144 | 148 |
| 145 | 149 | | | | | | |

[0053] Thus the disclosure provides the halogenases encoded (or provided) by each of SEQ ID NOS: 5-149.

[0054] Further, the disclosure relates to nucleic acid sequences encoding any of SEQ ID NOS: 5-149.

[0055] The disclosure relates to functional variants, derivatives, portions or fragments of any of the sequences disclosed herein as SEQ ID NOS: 5-149. One of skill will understand that the term “functional” relates to the halogenating activity of any of the full or complete halogenases described herein. Thus a functional variant, derivative, fragment or portion, is any variant, derivative, fragment or portion that exhibits halogenase activity (in other words, a variant, derivative, fragment or portion of any of the sequences described herein, which variant, derivative, fragment or portion exhibits an ability to promote, catalyse or stimulate a halogenation process). A halogenation process may be characterised by the addition of a halogen moiety to another compound or molecule.

[0056] The terms variant or derivative may embrace any sequence which, relative to any one of the sequences provided by SEQ ID NOS: 5-149 herein, may contain one or more amino acid mutations. The term “mutation” may include any alteration to any of the wild-type halogenase sequences disclosed herein. For example, the term “mutation” may embrace:
[0057] (i) one or more amino acid substitution(s) (where one or more of the wild type amino acid(s) is/are swapped or changed for another (different) amino acid—the term “substitutions” would include conservative amino acid substitutions); and/or
[0058] (ii) one or more amino acid deletion(s) (where one or more of the wild type amino acid residue(s) are removed); and/or
[0059] (iii) one or more amino acid addition(s)/insertion(s) (where additional amino acid residue(s) are added to a wild type (or reference) primary sequence); and/or
[0060] (iv) one or more amino acid/sequence inversions (usually where two or more consecutive amino acids in a primary sequence are reversed; and/or
[0061] (v) one or more amino acid/sequence duplications (where an amino acid or a part of the primary amino acid sequence (for example a stretch of 5-10 amino acids) is repeated).

[0062] Note, in points (i)-(v) above, the term “wild type” may relate to each of the amino acid sequences presented as SEQ ID NOS: 5-149above.

[0063] As stated, a variant or derivative sequence comprising one or more mutation(s) should be functional.

[0064] The terms “fragment” and/or “portion” may embrace (halogenating) fragments or portions of any of the halogenase sequences disclosed herein—including, for example those provided as SEQ ID NOS: 5-149 an/or variant or derivative (and functional) sequences thereof.

[0065] For example, a fragment may comprise from about 5 (or fewer) to anywhere up to (n−1) residues of the same sequence (where “n” refers to the total number of amino acid residues). In most cases, a useful fragment or portion will contain one, more or all of the motifs identified as SEQ ID NOS: 1a/b, 2 and 3 above. Thus, fragments or portions for use may contain, for example about 10, about 15, about 20, about 25, about 30, about 35, about 40, about 45, about 50, about 60, about 70, about 80, about 100, about 150, about 200, about 250, about 300, about 350, about 400, about 450 or about 500 residues (for example continuous or contiguous residues) from any of the halogenase sequences given as SEQ ID NOS: 5-149.

[0066] The terms “variant”, “derivative”, “fragment” and/or “portion” may also apply to nucleic acid sequences encoding any of variant, derivative, fragmented or portioned halogenase sequences described herein. In each case, a nucleic acid sequence of this disclosure may encode a functional halogenase (e.g. a halogenase provided by any of SEQ ID NOS: 45-149) variant, derivative, fragment or portion.

[0067] It should be noted that Dsg407 (SEQ ID NO: 6: halogenase from Cyanophage Syn10 GenBank: AGH56623.1) has been identified as a flavin dependent halogenase enzyme which iodinates substrates (i.e. it is capable of incorporating iodine). Indeed, the data shows that this particular halogenase is capable of regioselective halogenation of a diverse range of substrates (including chlorination and bromination of such substrates), with a preference for forming highly reactive aryl iodine species (in other words it exhibits a preference for catalysing iodination type reactions). This is an important finding as an FDH iodinase has yet to be identified. While the variant B brominase Bmp2 and the decarboxylating phenol brominase Bmp5 may be thought to utilise iodine in vivo, this activity has not been demonstrated in vitro.

[0068] The disclosure also provides a method of halogenating a substrate, said method comprising contacting a substrate to be halogenated with one or more of the halogenases identified herein. For example, a method of halogenating a substrate may comprise contacting a substrate to be halogenated with one or more of the halogenases encoded by SEQ ID NOS: 5-149above.

### DETAILED DESCRIPTION

[0069] The present invention will now be described in detail with reference to the following Figures which show:

[0070] FIG. 1: Overall structure and active site of the tryptophan-7-halogenase PrnA highlighting the conserved lysine residue (magenta) and the tryptophan substrate (green). Image obtained using structural and surface analysis (with CCP4MG molecular graphics software) to structural data of crystalline structure of PrnA obtained by Naismith et al (Science, 2005), deposited on PDB as 2aqj.

[0071] FIG. 2: Conserved dinucleotide motif, part of Rossmann fold. Common within FAD and NAD(P)H-dependent enzymes. A) part of the MSA₁ is shown, with sequence conservation ranging from blue (0% conservation) to red (100% conservation). B) The binding pocket of FAD (orange) in PrnA is shown, with the three glycine residues (pink) highlighted, showing their position relative to the β-sheet (purple) and a-helix. Image obtained using structural and surface analysis (with CCP4MG molecular graphics software) to structural data of crystalline structure of PrnA obtained by Naismith et al (Science, 2005), deposited on PDB as 2aqj.

[0072] FIG. 3: A) On the left, the MSA₂ is shown, next to the zoomed area of non FDH motifs. Highlighted is the single component FDH, Bmp5. B) the two tryptophans and IP residues are highlighted (in blue) relative to the β-sheet that they participate and the overall structure of PrnA. Image obtained using structural and surface analysis (with CCP4MG molecular graphics software) to structural data of crystalline structure of PrnA obtained by Naismith et al (Science, 2005), deposited on PDB as 2aqj.

[0073] FIG. 4: The looped formed by the FxxPxxSxG motif. The residues of this motif are forming a loop present in all structurally characterised FDHs. The loop is highlighted in red, relative to FAD (if present in structure) and the overall structure. It separates the flavin binding module from the substrate binding pocket where the regioselective halogenation takes place. Image obtained using structural and surface analysis (with CCP4MG molecular graphics software) to structural data of crystalline structure of PrnA, RebH, Mpy16 and PItA deposited in PDB with as the following files: PrnA(2aqj), RebH(4lu6), Mpy16(5buk), PltA(5dbj).

[0074] FIG. 5: The FxxPxxSxG motif. Sequence conservation ranging from blue (0% conservation) to red (100% conservation). On the right, each conserved residue of the new motif is mapped (red) onto the crystalline structure of PrnA, in relevance to the tryptophan substrate (green) and the flavin cofactor (orange). Image obtained using structural and surface analysis (with CCP4MG molecular graphics software) to structural data of crystalline structure of PrnA obtained by Naismith et al (Science, 2005), deposited on PDB as 2aqj.

[0075] FIG. 6: Colour coded branching clustering of different FDHs based on overall substrate preference. Bootstrapping analysis is shown in branches, to estimate confidence over the branching analysis.

[0076] FIG. 7: Splitting network and structural model of Dsg205. A) Shows split decomposition network of Dsg205 with variant B FDHs and fungal FDHs. B) Shows crystalline structures of representative variant A and B FDHs for direct comparison with the flexible C-terminus observed in (C) which is our generated model. C) The overall fold of Dsg205 is shown on the left, whereas on the right the cofactor binding pocket (orange) and the conserved motif forming loop separating the tunnel from the active site (green)

[0077] FIG. 8: Homology model of Dsg701.

[0078] FIG. 9: SDS PAGE electrophoresis of Dsg205 and Dsg701.

[0079] FIG. 10: Substrates accepted by Dsg205. An estimate of conversion based on peak areas of substrate and product. One halogenated product was seen in all cases. Estimates of conversions given above are based on PDA peak areas and do not take into account any change in extinction coefficient. In blue are the substrates that were also accepted by the Pleurotus ostreatus mushroom halogenase Dsg701.

[0080] FIG. 11: Substrates accepted by Dsg701 from Pleurotus ostreatus. In blue are the substrates that were accepted by both Dsg701 and Dsg205.

[0081] FIG. 12: Splitting network of MSA₂. Highlighted is viral halogenases in comparison to known tryptophan halogenases as well as tryptophan halogenases which have been associated with tryptophan containing peptide antibiotics. Branching analysis was performed using SplitsTree software.

[0082] FIG. 13: The figure shows the structural model of Dsg407 generated by Phyre2. In the green box we can see the FxxPxxSxG motif forming the conserved loop separating the FAD binding site (in orange box) from the active site. The figure also shows the crystalline structure of PrnA for comparison.

[0083] FIG. 14: A) Outline of purification steps in order to obtain B) pure protein without the histidine tag.

[0084] FIG. 15: Determination of oligomeric state of the protein using size exclusion chromatography on a precalibrated column with protein standards. The results are showing that Dsg407 (62 kDa of the monomer) is a trimer (186 kDa), as the homogeneous peak of the Dsg407 sample (in purple) elutes at the same time as β-amylase which is 200 kDa.

[0085] FIG. 16: Substrates accepted by Dsg407. An estimate of conversion based on peak areas of substrate and product. Estimates of conversions given above are based on PDA peak areas and do not take into account any change in extinction coefficient.

[0086] FIG. 17: Summarised pH studies for all halogens (I, Br, Cl) with Dsg407 and 6-azaindole.

[0087] FIG. 18: Structural characterisation of Dsg407 apoenzyme. A) Shows the crystal packing of Dsg407. B) Diffraction pattern of Dsg407 with spots appearing at maximum resolution 2.6 Å. C) Hanging drop of 3D orthombic shaped protein crystals of Dsg407. D) Biologically relevant structure of the trimer of Dsg407.

[0088] FIG. 19: Monomer of Dsg407 apoenzyme and B-factor model.

[0089] FIG. 20: FxxPxxSxG loop located in Dsg407 apostructure and conserve Lys79 in putative substrate active site.

[0090] FIG. 21: Extended loop at C-terminus of each monomer of Dsg407.

[0091] FIG. 22: Mass spectra corresponding to chlorinated, brominated and iodinated 6-azaindole. On the top of the image we can see the TIC of the biotranformation with NaCl at pH 3 in black, NaBr at pH 8 with red, NaI at pH 3 and NaI at pH8. Each mass spectrum is shown with verified accurate mass and the corresponding theoretical up displaying the expected isotope pattern for Cl, and Br.

[0092] Global Approach to Determining Distinctly Different Flavin Dependent Halogenases (FDHs)

[0093] The methodology consists of three bioinformatic components. Firstly compilation, alignment and analysis of the complete set of biochemically and structurally characterised FDH sequence data. By carrying out careful analysis on amino acid sequences and structural information of experimentally verified FDHs, series of conserved signature motifs can be revealed.

[0094] Second, utilisation of these series of sequence motifs to mine un-curated genomic data. The presence of these motifs, in the expected order provides confidence that the identified hypothetical protein is a FDH. This approach can be utilised to pool series of likely FDHs.

[0095] Third by looking at the phylogeny, and focusing on less explored species, distinctly different substrate specificity may be accessed.

[0096] Once a candidate is identified utilising this simple approach, it can be synthesised (optionally in gene optimised form), expressed, and its activity assayed. For example, Escherichia coli BL21 can be used as an expression platform. A medium throughput LC-MS assay of a 600 member library of small molecules was also developed.

[0097] The aim is to develop a method of bioinformatic analysis that is simple and easy and that can be readily adopted by others. Accordingly, the methods described herein have been developed utilising bioinformatics software available online. In this way, users can navigate genomes and pool potentially novel FDHs. A particular advantage of the methods described herein is that non-specialised laboratories can retrieve interesting candidates, within minutes.

[0098] Assembling a Definitive Series of Sequence Motifs Found in FDHs that can be Used to Mine, In Silico, for Previously Undiscovered Halogenases.

[0099] Structure and Mechanism

[0100] FDHs are an intriguing family of enzymes; they are composed of two main domains, the monooxygenase domain and the halogenase domain, connected by a 8-10 Å tunnel. Each of these domains, has its own role for FDH chemistry. FDHs are highly analogous with the two-component flavoprotein monooxygenases with which they share an evolutionary origin. Both families are dependent on a partner flavin reductase enzyme, which reduces FAD to FADH₂. Whilst flavin reductases can utilise both FAD and FMN, all FDHs investigated so far require FADH₂ and not FMNH₂ as their cofactor. PrnA, a tryptophan-7-halogenase, mediating the first step in pyrrolnitrin biosynthesis, was the first FDH to be investigated and structurally characterised; as such is considered the prototypical FDH. Following the first crystal structure of PrnA, 9 more structures of FDHs have been solved so far, all containing the Rossman fold, a motif known to be important for the binding of FAD. Once the cofactor has been reduced by the partner flavin reductase, FADH₂ binds to the flavin-binding site of the halogenase, where it reacts with molecular oxygen to form a flavin C4a-hydroperoxide. This subsequently oxidises the halide, bound nearby, (through interactions with the amide NH groups of Gly349, Thr348 and the hydrophobic ring of Pro344 in PrnA), to generate hypoalous acid. This reactive halogen intermediate is not released, instead it is guided through a channel (10 Å in PrnA), leading to the active site, where a conserved lysine residue reacts with the hypoalous acid to form a chloramine (FIG. 1). This chloramine is responsible for the regioselective/regiospecific halogenation of the natural substrates. The involvement of the chloramine in the mechanism of FDHs has been established by both structural (Dong et al, Science, 2005) as well as catalytic studies (Yeh E et al., Biochemistry, 2007).

[0101] Data Assembly, Alignment and Motif Identification

[0102] As a starting point, the amino acid sequences of the FDHs with strong experimental data supporting their substrate preference were collected within a local database. This included a comprehensive collection of sequences, as the experimental confidence of the annotation and characterisation of the original data can significantly influence downstream analysis; in other words, the more information we have of the original data being analysed, the more informative the output of the downstream analysis will be. The combination of comprehensive data and appropriate algorithms, can reveal important evolutionary changes such as substitutions, insertions and deletions that have occurred between variants, but can also reveal areas that have been protected by mutations and are conserved even between distant variants.

[0103] Due to the difficulties of the in vitro study of FDHs, there are several halogenases where gene knock-outs have confirmed their involvement in the biosynthesis of their associated halometabolites, but their exact substrate preference has not been established in vitro. One of the issues leading to lack of in vitro investigation, could be that many FDHs have been identified in actinomycetes, which are known GC rich organisms. The high GC content renders their genetic information difficult to be overexpressed in different organisms; something necessary for the overproduction of the enzymes from secondary metabolism. Additionally, there are examples of FDHs with solved crystal structures, but unfortunately no in vitro activity has been demonstrated; although there are hints about their associated halometabolites. FDHs have very high substrate specificity and, thus, either their natural substrate or a highly structurally related compound is required for activity. Furthermore, the exact stage of a biosynthetic halogenation step is not always clear and thus it is very often difficult to identify the biosynthetic precursor which is the natural substrate of the FDH. Sometimes a halogenase might act in early stages and the biosynthesis will not continue if the precursor is not halogenated. Other times, it might not affect the biosynthesis if first stage halogenation is omitted. Therefore, FDH gene deletions in the producing strain does not always provide evidence for the natural substrate.

[0104] Multiple sequence alignment 1 (MSA,), was performed in order to identify conserved residues across variants of FDHs which revealed three main sequence motifs. Of these motifs, two of them had been previously been identified; these are the GxGxxG and WxWxIP motifs. More excitingly, MSA₁ also revealed a third motif which has not been previously identified. This is the FxxPxxSxG motif. This could be either because the alignments so far have all included a disproportionate number of the well-studied tryptophan halogenases; the areas near the C-terminus (where the motif is located) were similar enough to miss the motif. It is also possible that although its presence was clear, it may have just been ignored, as the previously described GxGxxG and WxWxIP were initially considered as the signature motifs of FDHs. Unlike the other motifs, the inventors have found this new motif present in all characterised FDHs. Notably this motif is absent from flavin-dependent enzymes that mediate other reactions such as oxygenations; this is very exciting as the FxxPxxSxG motif can be definitively used for FDH assignment.

[0105] The GxGxxG motif is located within the first 20-30 amino acids of the N-terminus. This is part of the Rossmann fold and is present in all validated FDHs. This consensus is also known as the dinucleotide-binding motif (DBM) and is common within FAD and NAD(P)H-dependent enzymes. The importance of the glycine residues is well understood with the first glycine allowing for a tight turn of the main chain, thereby positioning the second glycine such that close contact may be made between the main chain to the pyrophosphate of FAD. The third glycine, allows close packing of the helix with the β-sheet (FIG. 2). This motif has been used extensively for FDH identification. As this motif is shared between flavoproteins, researchers should be cautioned that more evidence than this stand-alone motif is required to definitively predict FDH function.

[0106] The conserved tryptophans in the WxWx(IP) motif have been previously described as the signature motif of FDHs (Dong C et al., Acta cryst, 2004) (Dong C et al., Science, 2005). The two tryptophans, although not directly interacting with flavin, are located at the flavin binding module, and have been proposed by Dong et al to have evolved as a steric block, keeping the substrate distant from the flavin and thereby preventing the enzyme from catalysing a monooxygenase reaction (Dong C et al., Science, 2005). However, when W272/Phe and W274/Phe exchanges in PrnA were made individually or together no change in halogenating activity was observed, and even the more extreme W272/Ala mutation made little impact on the enzyme's activity; W274/Ala exchange resulted in enzyme redundancy (Flecks S et al., Angew Chem Int Ed Engl, 2008). Tryptophan is instrumental in protein folding and structure, and this result therefore made the inventors to challenge whether the loss of halogenase activity occurred due to potential conformational change, aggregation, misfolding or collapse, and therefore whether the WxWx(IP) motif can really be relied upon to predict halogenase activity.

[0107] The simplest way of examining the original hypothesis of Dong et al., (that the two tryptophans of the WxWxIP motif were evolved in FDHs to block monooxygenase activity) was to include in the alignments the ancestors of FDHs; this outgroup needed to be large enough to compete with the FDH numbers of sequences. The inventors gathered experimentally verified sequences of FAD monooxygenases together with all the sequences used in MSA₁ and performed MSA₂. Not surprisingly, the sequences could align overall. This means that areas that are a result of a deletion or an insertion in addition to various substitutions could be identified. It was shown that many members of the outgroup, including the mammalian monooxygenases have variations of this motif (FIG. 3). For example, kynurerine-3-monooxygenase (KMO) from Pseudomonas fluorescence has a WxHx motif, whereas KMO from Homo sapiens has a WxRx motif. Similarly, a Baeyer-Villiger oxygenase has a deletion over the first W and contains tyrosine instead of the second tryptophan, thus leading to the motif YxVP. PHBH contains a phenylalanine instead of the first tryptophan and others like geranylgeranyl reductases have a YxWxxP motif.

[0108] A third motif, FxxPxxSxG, which to our knowledge, has been overlooked in previous multiple alignments of halogenases caught our attention. We sought to investigate how this third and previously ignored sequence motif maps onto the available structures of FDHs. Intriguingly we saw that these residues are present in a loop that separates the active site from the isoalloxazine ring of the flavin cofactor binding pocket, in all solved crystal structures of FDHs (FIG. 4). In the structures of PrnA and PyrH the cofactor has a direct interaction with residues of this loop. Similarly, in PrnA the amine of the indole ring is also directly interacting with the loop. This loop may be seen to be always present in FDHs whether they act on a free or enzyme tethered substrate.

[0109] In a given fold, structural variability is a result of substitutions, insertions, and deletions of residues between members of the family. Such changes frequently correspond to loop regions that connect elements of secondary structure in the protein fold, and therefore, loops often determine the functional specificity of a given protein framework. It may be that this loop plays an important role in substrate specificity and active site configuration, which is the reason why nature has kept it protected from spontaneous mutations, as conservation correlates with functionality.

[0110] Unlike the other motifs, the newly disclosed motif has been found to be present in all characterised FDHs (FIG. 5).

[0111] Notably the new motif is absent from flavin-dependent enzymes that mediate other reactions such as oxygenations.

[0112] The identification of this motif enabled for the first time the definitive identification of FDHs in silico. Together with mechanistic and structural knowledge, the newly identified FxxPxxSxG motif permits the prediction of FDH function, even at low sequence similarity.

[0113] Mining, In Silico, for Previously Undiscovered Halogenases, Using a Phylogenetically Guided Approach.

[0114] We further used MSA2 for the construction of a phylogenetic tree (FIG. 6). Bootstrap analysis was used for both the phylogenetic tree as well as split network. Within this phylogenetic tree we saw that FDHs clustered according to substrate preference.

[0115] Tryptophan FDHs appear to cluster together, separate to the pyrrole FDHs.

[0116] Free pyrrole FDHs form a distinct cluster in comparison to the ACP bound pyrrole FDHs. (The addition of the outgroup was very important for the construction of a meaningful network, that could be used to extract information about the substrate preference.) This phylogenetic tree provides an excellent starting point for the discovery of halogenases with very different substrate preference to those which have previously been investigated. Using this tree we chose to investigate a series of phylogenetically distinctive halogenases. The encoding genes were codon optimised, synthesised and their gene products analysed. All of the genes resulted in soluble protein and halogenase activity could be determined.

[0117] We outline below our approach to halogenase discovery and biocatalytic investigation, and describe two examples.

### EXAMPLE 1

### Identification of dsg205 from Trichoderma virens, a Plant Beneficial Fungus

[0118] Trichoderma virens is a haploid filamentous fungus, known for its beneficial role in plant growth. Its 30 Mb genome is predicted to contain about 50 secondary metabolite gene clusters, half of which can also be found in other Ascomycota species such as Trichoderma atroviride and Trichoderma reesei.

[0119] Previous genomic analysis has revealed non syntenic genomic islands containing several monooxygenases and oxidoreductases and many other potential gene products, the annotation of which has so far been unsuccessful due to the low sequence similarity to known proteins.

[0120] Although it has become apparent that this organism might contain an as yet undiscovered reservoir of secondary metabolites, its ability to produce halogenated metabolites is known, making its genome an excellent model for FDH hunting, balancing both challenge and potential for our novel genomics led approach to successfully identify halogenases.

[0121] The halogenase amino acid sequences (fasta format) which were used to construct Multiple Sequence Alignment 1 (MSA₁), was added as a query sequence in blastp suit. The database used as a search set was the non-redundant protein sequences (nr). The search parameters were changed to only search against Trichoderma virens Gv29-8 (taxid: 413071). PHI-blast was selected as the algorithm and the FxxPxxSxG motif was included as the selected pattern. This yielded three hits all of which had been annotated as “hypothetical proteins”.

[0122] These were “hypothetical protein TRIVIDRAFT_60172” (this is Dsg205),

“hypothetical protein TRIVIDRAFT_192594” amino
acid sequence:.
(SEQ ID NO: 150)
MANIPEQCTVLVIGGGPAGSYAASALAREGIEVVLLEAEKFPRYHIGES
MLPSMRHFLKFIDAYEKWDAHGFNIKKGGAFRLNWSRPETYTDFIAAGG
PGGYAWNVVRSEADELLFKHAAECGVQTFDETKVASIEFAPATSDVQSL
GRPVSATWTRKDGSSGTVSFDYVVDASGRAGLISTKYLKNRSYNQGLKN
VASWGYWKNGGVHGVGTHKEGAPYFEALKDGSGWVWFIPLHNGHHSVGV
VQNQEMAAKKKREMTEPSSKGFYIESLDLVPGIKELLANAELVSEIKSA
SDWSYSASKYAFPGVRIAGDAGSFIDPFFSSGVHLALSGGLSAATTIAA
AIRGDCGEKAASSWHDKKTAESYTRFLLVVSSALKQIRSQDEPVINDFD
EATFERAFDLFRPIIQGQADADAKGKLTQAEISKTVEFCFKAFAHVSFE
EKEALVKKLKELGLDGDAYDESNRKALDELEKKLTPEEQSILKTLKGRR
MVRPEDSLNIDNFTLDSIDGLAPRLERGKLGLATAKKAEVKFTRHDPLS
FLNGESKAVKKALQNGHAELNERSEVHSTNVTNGDKPLNGHTKVEDQSV
ASLVAELVASERSLPQASLDESSRHRLISSLQESAEELETPYDSMLRFL
NASRQIALIKIGGDLGIFKCLAESKTPLSSKELAKPNMADPTLVGRIMR
YLVANRLAAETAPDQYVARKMTYALADPQIEGPMRFFHAVSSPSFQALP
DFLKETGYQNQPQTSALQKGLNTDLGLFAWLKQHPDLLKDFQNLMGIPK
EGNCLDVISFESAVIGGHEGPVFVDIGGNTGHQAKQLLAKYPELANRVV
VQDREETIKSASDVKGFQLMAHDFFSPQPVQGAKYYYLRAILHNWDDDK
ASQILSNIVPSMSTDSLMLIDELVIADQGSHVWPAGLDLQMYTLFGSSE
RTASQWDSILDRAGLRPVAVKKYAPVMGSSVIFAAPKFRCYTTL
and
“hypothetical protein TRIVIDRAFT_53554” amino
acid sequence:.
(SEQ ID NO: 151)
MAATAPVPKHTFAERAAANNLSDSQILNSNNVAGSSLPKESDVVIAGGG
IHGLIYAIHSAKHKPGNLKILLVEKNRKPGYKIGESTLPVFSMWCKMYG
LTAEYLLRIFGLKDGLCFYFLDRENQGKFKDFVINGTAGTLLSGFQIER
PTSELLFTLLAQRSGVNVYHGTEVNFDGTTVDGGLNKCNIGIAKGKSND
TPETSIQSSILVDATGRFRRVASKNAPIHRFEGWNYDAFWGYFTNPKDT
SKMPFPHYESCNTNHICFPEGWIWVIRLLSWEGSPTANLMDMMTYLLDC
AESGVPADQIPSTDELAKMFGLNYRWITSLGFAVRNDVEYPEDMSAYGT
REAERRFNYFVEKYPLIKEFMSNFELIEDHYGPGTTWYIRKSLTYQSPV
VSGPGWISIGDACGFTNPLWSPGINVGLSTSTYAAELTHKAFDAAKNAN
PEAAELSIRETMAPYDAYAKRLIPALNQMNCFNYVCFRDPRLGAQISAA
WQNIASALQGWGRIQGNYTLTPETFVDYATNWCYGAINPAYDIVARKAI
ELLAPIPLKDAVPDHIVQEVIEFADSIKKSTLESGCINLRWGGLFRRFD
NRLNYLEEKETKDTFARPCSNCSSWFVLRPDWKKCYSCGTERTDEESTI
LWNPVLV

[0123] As a comparison, the searches were repeated with the GxGxxG motif, which yielded 20-30 hits, as well as with the WxWxIP motif which yielded only 2 hits. Using the WxWxIP motif failed to reveal the “hypothetical protein TRIVIDRAFT_53554” as the proline residue of WxWxIP had been substituted with arginine in this variant. However, using the GxGxxG motif retrieved twenty hits comprising all flavin-dependent enzymes present in the genome, including the three halogenases that we identified with the FxxPxxSxG motif. These results together demonstrate that FxxPxxSxG is the motif to be used for fast and definitive FDH identification. The three FDH candidates identified using this method showed no significant similarity to tryptophan halogenases. More specifically when the tryptophan 7 halogenase (PrnA) was aligned against TRIVIDRAFT_60172 the two sequences could only align 50% of their sequences, with a sequence identity of 21% (sequence similarity 35%) with the major differences located near the C-terminus of the sequences. When this terminal sequence was aligned against the UniProtKB/Swiss-Prot database, it only showed moderate similarity in the C-terminus area with the Rdc2 fungal halogenase (47% sequence identity, 55% sequence similarity) and even lower similarity to pyrrole halogenase PrnC (22% sequence identity) which aligned against 66% of the sequence. All three identified FDH sequences of Trichoderma virens showed a comparable low similarity to known FDHs.

[0124] Out of these 3 halogenases identified in the Trichoderma genome, we chose TRIVIDRAFT_60172 (later renamed as Dsg205) to test in vitro.

[0125] The possibility of Dsg205 acting on carrier bound substrates was next assessed. We have been able to predict such specificity by employing a phylogenetic-like branching analysis. As the question asked was how similar Dsg205 was to known FDHs and in parallel how different it was from variant B halogenases which require the substrate to be carrier bound, we employed split decomposition to generate a splitting network, a variation of branching analysis (FIG. 7). Each split represents evolutionary distance. The model showed that Dsg205 was definitely not clustering with variant B halogenases as shown by the splitting of the two subgroups. Dsg205 clusters together with the fungal halogenases which have been shown to be more promiscuous accepting substrates of a range of series, in comparison to tryptophan halogenases.

[0126] Structural models of Dsg205 were next generated using the Phyre2 protein fold recognition server (FIG. 7). These models have a 100% confidence rating over 76% coverage of the original sequence. Disordered areas could be modelled at >90% confidence using multiple templates of 120 proteins with domain similarity. We could identify the active site through the presence of the conserved FxxPxxSxG loop which separates the FAD binding site from the substrate binding pocket.

[0127] A previous proposal has correlated variant A (acting on free substrates) and B (requiring carrier bound substrates) halogenases with the degree of structural order on the C-terminus (ordered in variant A, disordered in variant B). However, this correlation is not definitive as a recently a biochemically characterised variant B member, PItA, was structurally elucidated showed a mostly ordered C-terminal region (FIG. 7). It seems that this region serves to obstruct the active site from entrance of free pyrrole-2-carboxylate. A conformational change which most likely involves movement of C-terminal region to open access of the halogenation site to the carrier protein-tethered pyrrolyl moiety is necessary. The model we have generated does not show this sealing of the active site (FIG. 7). Instead the dsg205 structural model suggests a rather expansive active site able to accommodate a variety of small and larger substrates, this is in agreement with our branching analysis.

### EXAMPLE 2

### Dsg701 from Pleurotus ostreatus, a Common Edible Mushroom

[0128] The same methodology for identification of novel FDHs was used against the genome of Pleurotus Ostreatus PC15 (taxid: 1137138), otherwise known as the oyster mushroom. Pleurotus ostreatus is an active lignin degrader in forests and is also the third in the worldwide market of industrially produced mushrooms. Until now, there has been only one halogenase characterised from an edible mushroom and that is ArmH1 (and its homologues from the same producing organism). The FxxPxxSxG motif retrieved 4 potential FDHs in the P. ostreatus genome. These were hypothetical protein PLEOSDRAFT_1093300 (later renamed Dsg701),

hypothetical protein PLEOSDRAFT_1079235 (amino
acid sequence (SEQ ID NO: 152):
MASIAVPSASTILVIGGGPGGSYSAAVLAREGLDVVLLEADKFPRYHVG
ESQLASLRHFLRFIDLEKEFEEFGFQRKDGAGFKLNRHKREGYTDFVSQ
DPNNFSWNTVRSQADELMLRHASKCGAKVFEETKVTELEFEGSEQSGRP
VAALWKQKSGATGRITFSYLVDASGRNGIMSTRYLKNRQFNSLLKNVAC
WGYWEGTGKYLPGTSRENSPLFEALADESGWAWFIPLHDGTTSVGIVMN
QDISNEKKAKAKESGEDTSLVAHYLSELKRAPNVLALIGDGVHIKKSDA
PLISAASDYSYSATSYAGPHYRIVGDAGAFIDPYFSSGVHLAISGGLSA
AATICAEMKGGCTSTEAIAWHSAKVDTSYTRFMLVVLSAYHQIKSQEAP
VLSNKDEDNFDRAFDFFRPSKYRTDWTFIQGNTDVGRKLQGDDLRRTVE
FCAKHAYEPSLPEERKELVEKFGDPLRVLSAESAEDSEQVATEKRILKG
VAIRKLMRTEDIVHIDNFVADNLLGYKLRLIRGSLGLEKVL
,hypothetical protein PLEOSDRAFT_1108187 (amino
acid sequence (SEQ ID NO: 153):
MSLPRIPQRTTVLVIGGGPAGSYASTLLAREGLDVVLLEALKHPREHVG
ESMLPSMRQYLRFIDLENEYDIRGFLHKPGAFFKFIHGAPACYADFDIL
GRDKNTWHVFRAEADELMLRHAAQQGVKVFEEVRVDSTEFAGSDPTTSR
PIAANWKSKLGETGALSFDWLIDASGRQGLMATKYLKNRIYREGLRNVA
AYGYWEHAAAPVEEGNPRQNATWIECLTDKRGWAWHIPLHNGKTSIGVV
MHQETSNQKKAVGPKGLEAHYLDQVKLAPGVLERLGHGASYITGSVRST
ADFSYHAKSYSGDHYRIIGDAAAFVDPLFSSGVHIGMTGALSAACTILG
SMKEQITEVGACAWHDAKIGISQIRFLLVVLSAYRQMQHQGNYTVLGDF
NPQDFGRAFELFRPVYQGQHDVENKLTNEELERMIDFTRNFFLPISQDQ
HAAVSERLGHFMPINGPVMGPDDLAKVLDDDDSDAKAVLQKINARKVLS
TEMGSSGLNSESVNGYTLILEKGRLGMKKEIGVA
and
hypothetical protein PLEOSDRAFT_1103280 (amino
acid sequence (SEQ ID NO: 154):
MSLPRIPQRTTVLVIGGGPAGSYASTLLAREGLDVVLLEALKHPREHVG
ESMLPSMRQYLRFIDLENEYDIRGFIHKPGAFFKFIHGAPECYSDFDLL
GQDKRTWHVFRAEADELMLRHAAQQGVRVFEEVRVDSIEFAGSDSMSSR
PITANWKSKLGETGAISFDWLIDASGRQGLMATKYLKNRIYREGLRNVA
AYGYWENAPVEEDGSHQNATWIECLTDKRGWAWFIPLHNGKTSVGIVMH
QETSNQKKADGPKGLEAHYLDQVKLAPGVLKRLGNDATYITGSVRSTAD
FSYHAKSYSGDHYRIIGDAAAFVDPLFSSGVHIGMTGALSAACTILGSM
KEQVTEVEACAWHDAKIGVSQTRFLLVVLSAYRQMQHQGNYTALGDFNP
QDFGRAFELFRPVYQGQHDVENQLTNEELERMIDFTRNFFLPVSQDQYA
DVGERFGQFTEINGPVMGPDDLAKVLDDDDSDAKAVLQRINALKVLSNE
MGSSGLNSEAVNGYTLVVEKGRLGMKKVINA

[0129] The closest orthologue to PLEOSDRAFT_1093300 is a hypothetical protein from Agaricus mushroom, which are both edible and poisonous species. When compared its sequence against Dsg205 from Trichoderma virens it was shown that the two sequences have 45% sequence identity and 60% sequence similarity.

[0130] When I analysed the gene clusters of Pleurotus ostreatus PC15 I identified 22 clusters which did not share sequence similarity to any known BGCs. The only FDH which was in a BGC was hypothetical protein PLEOSDRAFT_1079235. The other three are probably scattered around the genome of P. ostreatus.

[0131] The first FDH example identified from uncharacterised genomic deposits was dsg205 and we were able to carefully annotate the candidate and the neighbouring genes, to obtain as much information possible for the activity of Dsg205. However, one of our aims is to be able to show activity in sequences that there is no information about their function, other than our annotation. We therefore selected the hypothetical protein PLEOSDRAFT_1093300 as our next candidate for production and assessment of halogenase activity, as the only information available about PLEOSDRAFT_1093300 is that it contains an open reading frame and might be a protein and therefore the level of challenge is what we need to show activity. We named this candidate Dsg701.

[0132] Branching analysis (see FIG. 7A) revealed that Dsg701 did not require a carrier bound substrate. We also generated a homology model (FIG. 8) with which we can see a more ordered C-terminus in comparison to Dsg205, with an equally open access substrate binding pocket indicating likely broad substrate specificity. Dsg701 was selected for codon optimization synthesis and heterologous expression in E. coli BL21.

[0133] Protein Production and Purification

[0134] We designed a codon optimised gene for the heterologous expression of Dsg205 and Dsg701 in Escherischia coli BL21. We cloned these genes individually into the pUC19 vector enabling the introduction of a TEV cleavable N terminal octahistidine tag to ease purification of each protein. The resulting constructs were named pDSG205 and pDSG701. Conditions that would enable good levels of protein production were screened More specifically small scale cultures were used to determine conditions for each construct that resulted in the production of good levels of soluble protein. A single colony, from a fresh transformation in BL21 (DE3) chemically competent cells was used to inoculate 10 ml LB medium containing appropriate antibiotics. In most cases the expression vector used was pSG181, which carries a kanamycin antibiotic cassette. The culture was incubated over night with shaking at 37° C. The starter culture was diluted 100-fold into fresh LB medium containing kanamycin and incubated as before until the cell density reached an OD₆₀₀ of 0.4-0.6. The culture was separated into 10 ml cultures, into sterile plastic 50 ml falcon tubes. These tubes were induced at varied concentrations of IPTG, 0 mM, 1 mM, 0.5 mM and 0.1 mM and incubated at either 28° C. for 18 h, 16° C. for 16 hours or 37° C. for 4 hours (FIG. 3.4.A). The pellets were then collected and lysed with lysozyme (2 mg ml⁻¹ of lysis buffer 1: Tris-HCl 50 mM, NaCl 25 mM, 5% Glycerol, pH=7.4) for 2 h in ice. A small amount of the pellet was kept for further assessment of protein solubility by SDS-page. Following centrifugation to separate the crude lysate from cell debris, the lysate was subjected to SDS-gel electrophoresis. For each temperature, we had also included an uninduced control sample. The control would either have a very faint band, corresponding to the size of the band of interest, or it would not be present when compared to the induced samples. The faint band of uninduced samples could be a result of leaky expression, something that T7 promoters are known for. Levels of protein production were assessed visually comparing the size of the band in SDS page relating to the halogenase. Relative quantification of each band could be done using Odyssey Imaging studio.

[0135] Once the conditions that enabled good protein production for each member were identified, we scaled up accordingly, lysed the cells and performed NiNTA purification with increasing amounts of imidazole, to finally obtain relatively pure protein. The NiNTA purification was optimised accordingly for each individual construct, and details are in further chapters. The eluted fractions were subjected to SDS-gel electrophoresis to assess efficiency of IMAC purification and binding to NiNTA.

[0136] The best conditions for production were selected (in both cases optimal conditions were found to be 16° C. for 18 h, with 0.5 mM IPTG), resulted in good amounts of soluble protein (10 mg/L and 5.8 mg/L as a 120 KDa dimer of Dsg205 and Dsg701 60 kDa as a monomer respectively) (FIG. 9).

[0137] Assaying Halogenase Activity

[0138] A small selection of electron rich substrates were used as an initial assay of halogenase activity by Dsg205 and Dsg701, supplemented with the flavin reductase PrnF.

[0139] We tested both proteins in purified form (using no enzyme, boiled enzyme and acidified reactions as negative controls). PrnF was provided enabling the reduction of FAD to FADH₂. Both proteins showed halogenase activity.

[0140] Having confirmed activity we explored the activity of the new halogenases against substrates within a 600 member compound library. Activity was determined using an LC-MSMS assay.

[0141] We observed a previously unprecedented level of enzyme promiscuity with a diverse series of compounds being accepted as substrates at good levels of conversion. Our study revealed that Dsg205 and Dsg701 could halogenate 33 (FIG. 10) and 28 members of the library respectively (FIG. 11), with LC determined conversions ranging from 5 to 75%. These low conversions are also noteworthy as they reveal that these compounds are able to be accepted as substrates and represent a good starting point for future development. Analysis revealed that, for all but a few of these biotransformations, a single new peak could be seen in the LC trace, indicating that the reactions had predominantly proceeded regioselectively The compounds that were accepted by the halogenases, and their relative conversion levels are shown in the following figure.

[0142] Conclusion

[0143] Two novel halogenases of eukaryotic origins have been identified from uncharacterised genomic deposits. These are Dsg205 from the small filamentous fungus Trichoderma virens and Dsg701 from the edible mushroom Pleurotus ostreatus. Both sequences had been deposited in public databases as hypothetical proteins. Both novel FDHs were predicted (using the in silico methodology developed during this project) to act on free substrates and that they could show a broad substrate tolerance based on the flexibility of the C-terminus in the structural models that we generated.

[0144] Both FDH genes were successful cloned and expressed in E. coli which resulted in good yields of soluble protein. We tested the purified proteins against 600 small molecules and we showed for the first time a remarkable substrate tolerance of these wild type enzymes. Dsg205 accepted 33 structurally different substrates, while Dsg701 has accepted 27. 15 of these substrates were both accepted by Dsg205 and Dsg701. We saw conversion with a wide range of substrates, with some of the conversions estimated as high as 75%, as in the case of 8-quinolamine. We have also demonstrated that these phylogenetically distant FDH variants, although they exhibit a natural flexibility, they seem to retain the regioselective halogenation character that makes these enzymes attractive for biocatalysis. Although our yields for the majority of the substrates are modest this represents an exceptionally good starting point for a halogenase enzyme.

[0145] To our knowledge this is the first demonstration of phylogenetically different FDHs with such a broad substrate range from the wild type enzymes. Previous studies have tried to engineer tryptophan halogenases PyrH and PrnA to accept non-indolic substrates such as kynurenine, anthranilamide and anthranilic acid with yields ranging from 19% to 76% conversion. We have shown moderate to high yields with the wild type enzymes against a broad range of structurally different substrates, with retention of regioselectivity and moderate yields. This represent a great starting point for protein engineering or directed evolution, to increase the conversions and enzyme stability. Furthermore, this directly shows that being the identification of the definitive loop FxxPxxSxG can help identify FDH variants that do not show significant similarity to know FDHs, even if the only information of those variants is that it might exist as an open reading frame.

### EXAMPLE 3

### Dsg407 from the Cyanophage Syn10

[0146] At the beginning of this project, the only characterised (by others) flavin-dependent halogenases (FDHs) from eukaryotic organisms were Rdc2 from the fungus Pochonia chlamydosporia and ChIA from the slime mold Dictyostelium discoideum. All other studied FDHs have been identified from bacterial species and more specifically, from the phylum of actinobacteria. The discovery of Rdc2 was especially exciting as it revealed that eukaryotic genomes could potentially harbour variants of FDHs with enhanced substrate flexibility compared to bacterial FDHs, while retaining the regioselective manner of halogenation which makes them especially attractive.

[0147] We searched for FDH variants from uncharacterised deposits of organisms in other kingdoms of life, away from fungi and bacteria. During those searches, we came across variants from archaebacteria including halophiles, thermophiles and psychrophiles as well as from plants and even arthropods. The most surprising of all findings however, was of a group of hypothetical proteins of viral origins.

[0148] Viruses are notorious for their small genomes, selecting only for genes that are important for their persistence. Although small, viral genomes are capable of acquiring new genes through horizontal gene transfer and through transposable elements. Horizontal transfer very frequently occurs from the host to the virus but the opposite occurs very rarely. Although the viral genomes are flexible, they exhibit unique selection pressures against deleterious and unnecessary additions to their genomes, enabling their genomes to be as efficient and minimalistic as possible for survival. The possibility that viruses have evolved or obtained and retained modifying biosynthetic genes like halogenases, is extremely surprising and remarkable. Here, we discuss our findings with a halogenase from the cyanophage Syn10.

[0149] Sequence Analysis of Dsg407 from Syn10

[0150] The identified FDH variant from the cyanophage Syn10 was hypothetical protein CPUG_00131. We renamed this variant Dsg407. This phage was isolated in 1986 from the Gulf Stream (not by the authors of this invention), as a double stranded viral DNA. Interestingly enough, Dsg407 only shows low >48% sequence similarity to hypothetical proteins from various cyanophages like cyanophage P-TIM40, P-RIM44 and phages from metagenomic samples. Additionally, when aligned against known halogenases it shows a very low 30% similarity to PrnA which brings it to the twilight zone of sequence similarity (25%-35%). The monodechloroaminopyrrolnitrin halogenase PrnC aligned only locally around the FxxPxxSxG motif (19% query coverage) with 31% sequence identity for the aligned area. This clear variation from the known halogenases could be also seen when be performed a simple blastp alignment. This low similarity to other FDHs other than cyanophages putative sequences reflects a clear sequence variation in viral FDHs which perhaps could also signify structural and mechanistic variation of viral halogenases compared to fungal and bacterial halogenases.

[0151] We next sought to find if Dsg407 could have been hijacked from cyanobacteria or other marine microorganisms. We analysed all the available genomes of the synechococcales in order to extract potential halogenases. This search yielded 4 potential FDH sequences from cyanobacteria including Phormidesmis priestleyi, Acaryochloris marina, Aphanocapsa montana and Prochloron didemni, but none in Synechococcus, which is the host of Syn10. When we aligned the top hit of this search against Dsg407, we did not observe any significant similarity, with the local alignment covering only 41% between the two sequences and with a sequence identity of 29% for the aligned area. Same level of similarity was demonstrated for all other hits, showing that Dsg407 is very unlikely to have been hijacked by Syn10 from these organisms, unless extreme recombination, insertions and deletions were induced by viral purifying selection.

[0152] We next submitted both the cyanophage Syn10 genome as well as the genomes of the cyanobacteria Acaryochloris marina MBIC110117 and Prochloron didemni on antiSMASH, to identify potential gene clusters that these halogenases could fall in. As expected, cyanophage syn10 genome does not seem to organise its genes in gene clusters and therefore not a single gene cluster was identified in its 177103 bp genome. The cyanobacterial species were found to contain several gene clusters encoding for bacteriocin, ladderanes, lassopeptides and terpenes, but none of these gene clusters was found to harbour any of the identified halogenase genes.

[0153] When we performed split decomposition/branching analysis of Dsg407 with Multiple Sequence Alignment (MSA₂) we could see that Dsg407 had common ancestry with tryptophan halogenases as they are located in the same extended spitted cluster (FIG. 12). However, there is a clear evolutionary distance between Dsg407, the typical tryptophan halogenases and tryptophan halogenases that prefer to act on tryptophan containing peptides, which is reflected by a clear splitting between those three, into three subclusters. Our interpretation of this result was that Dsg407 could act on free substrates and that it would possibly need substrates that are structural analogues of indole or tryptophan, but not necessarily tryptophan like PrnA or coupled tryptophan to a peptide, like KrmI.

[0154] We also generated a homology structural model of Dsg407 using Phyre2 (FIG. 13). We generated an intensive model, which uses all sequences exhibiting maximum sequence coverage (set threshold above 90%) and provides a pairwise distance alignment; this can then identify regions of no coverage and model them by the ab initio simplified physics tool of Poing, a function of Phyre2. Of our sequence, 494 amino acids (93% of our sequence) gave a 100% confidence to the model. When we compared our model against PrnA, we observed the same heavily helical structure that tryptophan halogenases have, with the pyramid and box shape. However, there is clearly a participation of more loops in the packing of the C-terminus in Dsg407, which could potentially reflect on more intense conformational changes upon substrate binding and perhaps a potentially more flexible substrate specificity than the typical tryptophan halogenases. Furthermore, we could identify the active site of the Dsg407 based on the presence of the FxxPxxSxG motif, as well as the co-factor binding site. It looks like the important residues in PrnA are also present in Dsg407, with slight rearrangements however, as several loops have been introduced possibly mediating conformational changes upon specific triggering.

[0155] Cloning and Purification of Dsg407

[0156] As with the other halogenases tested in this project, the ideal protein production conditions were determined to be when inducing at OD₆₀₀ of 0.4-0.6 with 0.5 mM IPTG and incubation for 16 hours at 16° C. These conditions seem to be common with all FDHs that we have identified, unrelated from which organism they originate. We used these conditions to scale up to 8 L of culture, which was lysed by sonication and subjected to immobilised metal affinity chromatography (IMAC) manually using biorad columns prepared with equilibrated Nickel resin (Thermos). After elution of our protein, and buffer exchange using PD10 desalting columns to remove the imidazole, we obtained a highly pure Dsg407 N-terminus 8× His tagged with excellent yields of 13 mg ml⁻¹ (FIG. 14).

[0157] We also sought to determine the oligomeric state of Dsg407. In order to be certain about the results, we decided to cleave the affinity tag from the N-terminus of the protein. After IMAC purification and buffer exchange to remove imidazole, we incubated the enzyme with a 1:10 ratio of Dsg407: Tobacco Etch nuclear-inclusion-a endopeptidase (TEV protease) in dialysis bag and incubated overnight at 4° C. It is important to highlight that buffer exchange to remove the imidazole from the sample is quite important for the TEV cleavage step, as we have noticed presence of imidazole in the sample leads to Dsg407 precipitation when the sample is left dialysing overnight. Once cleavage of the His-Tag was confirmed by SDS Gel against an undigested sample of Dsg407-His⁸, we subjected the sample to a second IMAC purification step but this time, we collected the flowthrough which contained our cleaved Dsg407. The sample was then subjected to size exclusion chromatography with a column which had been previously calibrated with protein standards, using the same equilibration, and running method for Dsg407 and standard. The results clearly demonstrated that Dsg407 exists as a trimer, something that was also confirmed by crystallographic data obtained from the solved structure of the apoenzyme. Furthermore, size exclusion chromatography revealed a monodispersed homogeneous sample, demonstrating an excellent purification and protein sample quality (FIG. 15).

[0158] Dsg407 Against Library of 300 Compounds

[0159] Having demonstrated that it was possible to express dsg407 and obtain good quantities of pure and soluble protein, we wished to determine whether that enzyme had any activity as a halogenase. We used a master library as a test bed for probing halogenase activity. An LCMS-based approach was used for analysis of the assay; the assay conditions were modified for those used for Dsg205 and Dsg701. NaBr was used as the halogen source and Dsg407 was tested against a small subset of the master library. We observed bromination of some of those compounds.

[0160] An FDH iodinase has yet to be identified. The only known FDHs that has been discussed to be able to utilise iodine in vivo was the variant B brominase Bmp2 and the decarboxylating phenol brominase Bmp5. However, this activity has not been demonstrated in vitro. Specifically, in a publication that followed their initial discovery where the mechanism of these enzymes was tested in vitro, there has been no mention of iodinase activity for either enzymes⁴³. Another discussed enzyme which could perhaps act as an iodinase is CaIO3 from calicheamicin biosynthesis. However, there are no in vitro or in vivo experiments to our knowledge demonstrating such activity of CaIO3.

[0161] Encouraged by our results with Dsg407 and NaBr, we also tested for NaI, as the incorporation of C—I bond would be a modification highly desirable and unprecedented from the toolkit of selective halogenating biocatalysts. Surprisingly, Dsg407 enzyme not only incorporated iodine to produce the corresponding iodinated products, but it showed a preference for iodine.

[0162] We immediately sought to test the full master library against Dsg407 with NaBr and NaI. For the assays we used 10 μM Dsg407, 1 μM PrnF, 1 μl of substrate (10 mg/ml), 10 μM FAD, 5 mM NADH and 10 mM NaBr or NaI in Hepes Buffer at pH=7.2. With Dsg205 and Dsg701, only 3 out of 300 compounds of the initial 300 compound library were halogenated. With Dsg407 10% of the library (30 compounds) were accepted as substrates of Dsg407. As with the other two halogenases, we repeated the assays with the positive hits at least in triplicate, including controls with boiled and acidified enzyme as well as absence of enzyme, as we wanted to be sure that halogenation is mediated by Dsg407, which was the case. We did not observe any halogenated products in the controls. Furthermore, we observed halogenation of the same products with both NaBr and NaI, however we got higher conversions with NaI, hinting that the enzyme prefers iodine.

[0163] Approximate conversions were calculated based on PDA peak areas of both substrate and halogenated product and do not take into account any change in extinction coefficient that may occur in halogenation. For the substrates accepted by Dsg407, we only observed a single new peak appearing after the starting material, indicating regioselective halogenation, although it is possible that minor regioisomers were not observable due to low conversions of several of the substrates. We only observed the presence of two new peaks in the case of 5-azaindole but after analysis of the starting material we determined that the starting material was contaminated with small traces of 6-azaindole, which is also a substrate of Dsg407 Furthermore, Dsg407 accepts D-tryptophan but not L-tryptophan, showing a degree of enantioselectivity which has not been seen previously with tryptophan halogenases. Most tryptophan halogenases act on L-tryptophan but can also accept D-tryptophan. Dsg407 also accepted complicated and exotic moieties like spiroindoles which were passed to us by our collaborator Professor Richard Taylor. These results together indicate a very strong substrate flexibility in combination with the unprecedented ability to incorporate C—I bonds in vitro. Additionally, we have shown that Dsg407 can accept a variety of heterocycles including N-, S-, and O-heterocycles. Finally, although our initial results show moderate conversion for most of the accepted substrates, it should be highlighted that Dsg407 is a wild type enzyme and the substrates that have been accepted are most possibly not the natural substrates. Therefore, these initial results are rather remarkable, considering that PrnA and other halogenases were engineered by directed evolution and rational design to expand their substrate scope and demonstrate yields from 15-65%.

[0164] Substrates Accepted by Dsg407

[0165] Having demonstrated Dsg407 halogenase activity in such a broad range of substrates, we sought to test if we could also show this activity with the crude lysate. Unsurprisingly, halogenation of these compounds can also proceed with the crude lysate, this result has been demonstrated with all FDHs investigated so far. Furthermore, by addition of 10-fold excess of the halogen salt of choice 100 mM NaI or 100 mM NaBr, the substrates can be selectively brominated or iodinated respectively. As a control we also prepared an empty vector lysate (pSG181 without dsg407 insert) from 100 ml of culture; this was used to determine whether the reaction could be promoted from any other components in the lysate. We saw that this was not the case.

[0166] Optimisation and pH Studies with Dsg407 Pure Enzyme

[0167] We sought to investigate if we could modify assay parameters for better conversions. As such, we tested various buffers including Hepes, Phosphate buffers, Tris-HCl at pH 7.2, however we did not observe any significant difference between these buffers. We next performed a pH screen, using some of the initial purified enzyme Dsg407 preps.

[0168] For the pH studies, the assay conditions were 10 μM Dsg407, 10 μM of FAD, 1 μl of substrate (10 mg/ml in DMSO), 10 mM of either NaBr, NaCl or NaI, 5 mM NADH, 1 μM of PrnF and 50 mM of the buffers mentioned above at the appropriate pH, in 96 well plates, at 100 μl assays. We used 6-azaindole as it gives good conversions with Dsg407. The reactions were all run in triplicate for all three halogen salts for 90 mins at 30° C. The workup was performed carefully using a precalibrated multichannel pipette, for comparable sample preparations. Both starting material and halogenated product were monitored at 335 nm using the PDA detector of the Waters UPLC system.

[0169] The results from the pH studies confirm that iodine is the preferred halide of Dsg407 as we can see that the conversions are significantly higher with this halogen. The highest conversions are achieved at pH=8 or in lower pH bellow 5.5 (FIG. 17). These results are remarkable, as it shows a pH flexibility which has not been demonstrated in any other FDHs.

[0170] Second and equally remarkable observation from the pH studies is that chlorination can occur in lower pH. There is a clear inhibition of chlorinating activity at pH >5. This behaviour was shown with all accepted substrates tested and therefore it is not only something that we are observing with 6-azaindole. Furthermore, when we repeated our usual controls (no halogenase and boiling of sample) we did not observe any chlorinated products, in presence of NaCl. Acidic conditions would protonate the pyridinic cation of 6-azaindole, making it less reactive, however this is exactly the point when halogenation occurs with Dsg407, which is the opposite of what would be expected to happen with chemical halogenation. Finally, bromination is stably occurring at all pH including pH 6, where neither iodination or chlorination proceeds. This final observation, together with the other two related to the other halogens is very intriguing and raises several important questions about the enzymatic mechanism of this enzyme, which requires both kinetic as well as structural investigation in order to start to understand.

[0171] Steady State Kinetics of Dsg407 and 6-azaindole

[0172] We next sought to determine the kinetic constants of Dsg407 with the substrate 6-azaindole, at the optimal pH for chlorine, bromine and iodine. For iodine, we determined the kinetic parameters for both pH=3 and pH=8, as both of them showed high conversions. Initial rates were calculated based on substrate consumption, at 0, 2, 4 and 6 minutes and the substrate concentration was varied for the best fit for the Michaelis-Menten curve. All assays were run in 150 μl, in 96 well plates and the PrnF concentration was always in excess to ensure that production of the cofactor FADH₂ was not a limiting step. Assays were always performed at 30° C. and all assay components except the substrate and NADH were preincubated at 30° C. NADH was added the reaction started by addition of substrate and terminated with addition of formic acid. All assays were run in triplicate and the assay conditions were the same used for the pH studies, but instead we were using 15 μM PrnF.

| Enzyme | K_{cat} (min⁻¹) | K_{M} (μM) | K_{cat}/K_{M} |
|---|---|---|---|
| Dsg407 (NaI, pH = 3) | 4.8 ± 0.6 | 35.3 ± 2.1 | 0.14 ± 0.07 |
| Dsg407 (NaI, pH = 8) | 5 ± 0.5 | 27.8 ± 1.6 | 0.17 ± 0.04 |
| Dsg407 (NaBr, pH = 7) | 2.4 ± 0.6 | 53.6 ± 3.2 | 0.04 ± 0.08 |
| Dsg407 (NaCl, pH = 3) | 4.4 ± 0.5 | 35.8 ± 4.3 | 0.12 ± 0.07 |
| PyrH | 2.5 ± 0.4 | 15.2 ± 4.2 | 0.16 ± 0.05 |
| PrnA | 1.1 ± 0.1 | 20.7 ± 0.1 | 0.05 ± 0.005 |
| RebH | 0.6 ± 0.1 | 18.7 ± 1.3 | 0.02 ± 0.004 |
| SttH | 1.7 ± 0.1 | 25.3 ± 3.2 | 0.07 ± 0.01 |
| Th-Hal (30° C.) | 4.3 ± 0.5 | 12.2 ± 1.8 | 0.35 ± 0.07 |

[0173] The results were compared with related FDHs including the tryptophan 5-halogenase PyrH, tryptophan 6-halogenase SttH and tryptophan 7-halogenases PrnA and RebH. By selecting halogenases with different regioselectivities, a better comparison of kinetic parameters for FDHs in this class can be obtained and shown.

[0174] The k_{cat} values of Dsg407 with iodine and chlorine were found surprisingly found to be higher than any of the other tryptophan halogenases, which is rather surprising as we have not yet managed to obtain full conversion with 6-azaindole, whereas the tryptophan halogenases all reach full conversion. Dsg407 is found to be as fast if not more as the thermophilic halogenase Th—HaI when it acts as an iodinase and two times faster than PyrH. However, it is obvious that Dsg407 has almost two times higher Kₘ compared to all the other FDHs compared showing that it has less high affinity for 6-azaindole compared to all other FDHs against their natural substrate tryptophan. Finally the ratio of K_{cat} over K_{M} showed that our enzyme acts better as an iodinase and especially at higher pH and significantly less good as a brominase, however the catalytic efficiency of Dsg407 compared to the Th—HaI is 2 times less, although it is significantly higher than most of the other FDHs compared in this study.

[0175] These results suggest that our assay needs further optimisation, as there could be several factor inhibiting our reaction and preventing our enzyme reaching optimal conversion. Furthermore, although we can confidently compare the kinetic parameters of Dsg407 against varied pH and halogen, our kinetic studies calculated initial rates based on substrate consumption whereas all other FDH parameters were determined based on product production.

[0176] This enzyme seems to have an ability to utilise all three halogens, with iodine functioning in both high and low pH but with a preference for higher pH and chlorine at lower pH, whereas bromine can be utilised stably at all pH, with lower kinetic parameters reflecting the significantly lower yields compared to iodine and chlorine, making it a remarkable halogenase with great potential for biotechnological applications.

[0177] FIG. 18C shows an X-ray crystal structure of the apoenzyme Dsg407 at 2.75 Å, after synchrotron radiation. The crystals were obtained using the hanging drop method in 2 μL (1:1 protein to reservoir ratio) at room temperature against 500 μL reservoir solution containing 0.1 M Tris HCl pH 8.5, 0.2 M magnesium chloride hexahydrate, 30% w/v polyethylene glycol 4,000 (FIG. 18B). Molecular replacement was not straight forward, because of the low similarity to any structurally characterised FDHs. However with a combination of modelling building using PrnA and RebH and intensive refinement we have been able to determine that Dsg407 is a trimer (FIG. 18D). Although the crystal packing showed an asymmetric hexamer, with a butterfly shape (FIG. 18A), we showed that the biologically relevant oligomeric state is that of a trimer. More specifically, as shown by the homogeneity of the sample analysed by size exclusion chromatography, the sample that was crystallised was the catalytically active species, corresponding to 200-180 kDa which shows the trimer of Dsg407 (60 kDa as a monomer).

[0178] Both the solved structure and the homology model of Dsg407 (that we had previously generated), show that there is a higher loop participation in the overall structure. Interestingly, the overall structure seems to be more disordered than other FDHs. There are significant differences observed between the monomer of Dsg407 and other FDHs (apo structures) in the flavin binding pocket and the C-terminus, which are found to be significantly more mobile in Dsg407. The mobility of those areas is shown in the B-factor or Debye-Waller factor model, used to describe the attenuation of xray scattering caused by thermal motion in those areas (FIG. 19). The yellow areas correspond to the extensively more disordered areas.

[0179] All structurally characterised tryptophan halogenases tend to envelop the substrate by a tightly ordered C-terminus. In the case of Dsg407, the C-terminus has an increased loop content. Strangely, the characteristic helix which usually holds the C-terminus in tryptophan FDHs, is interrupted by several unusual loops showing a helical propensity. This structural behaviour could enable these loops to act as both loop but also as a helix. Furthermore, these areas are highly mobile in the B-factor map. This could reflect how Dsg407 can accommodate such diverse substrates, from small aromatics to complex spiroindoles.

[0180] Using the FxxPxxSxG motif (highlighted in green cylinders, FIG. 20) we were able to identify the loop separating the putative substrate binding site from the tunnel guiding the hypoalous acid. Furthermore, using multiple sequence alignment 1 (MSA₁) we were able to identify the putative conserved lysine residue which has been shown to be responsible for the regioselective halogenation, in other FDHs. When we located Lys79 it became apparent that it was in very close contact to Ser359, which is one of the conserved residues that we have found in the FxxPxxSxG motif. Specifically, we calculated the distance between these residues to be less than 2.5 Å. Previously this serine residue has been suggested to guide the hypoalous acid towards the lysine residue. This very short distance would make the hypoiodous acid or hypobromous or hypochlorous acid impossible to bind, as solely the ionic radius of iodine is 2.2 Å. This makes us postulate that the serine is there to block the Lys79 from reacting with the hypoalous acid before a certain stimulus is introduced, which could change the conformation and perhaps increase the distance between serine and lysine for the hypoalous acid to react with the lysine.

[0181] From the apo Dsg407 we cannot deduce much about the halogen binding site as the same residues that have been found to coordinate Cl⁻ in tryptophan FDHs are also present in the apo structure. Although Dsg407 is 8 amino acids shorter than PrnA, it contains almost twice the amount of histidines and lysines. In combination with the higher proportion of loop content, pH might be a trigger for conformational changes which could enable chlorine to bind to the halogen binding site and enable it to participate in chlorination in lower pH. In pH above 5, a different conformation might not facilitate binding of chlorine. We ought however to consider that there could be a second halogen binding site, which has evolved to coordinate larger halogens such as bromine and iodine. However, this is a working hypothesis based on structural data and it needs further investigation in order to show exactly what is happening from a mechanistic point of view.

[0182] Finally, when facing the trimer from the frontal plane (FIG. 21) we could see that the trimer at the pore formed by the three monomers there is an extended loop connected to an a-helix. The residues of these loops are found in near the C-terminus of Dsg407. The extended loop is formed by Met427, Cys428, Asn429, Tyr430, Met431, Pro432, Glu433, Ser434, Met435, Gly436, Pro437, His438, Arg439, Gln 440. Specifically, the histidines and arginines of each monomer are oriented in such a way to face approximately 2-4 Å away from the same residues in the other monomers, bringing them in very close orientation from each other. It is very possible that these residues might contribute to the oligomeric assembly. Additionally, sensitivity of these residues to pH changes, might lead to conformational changes could contribute to the effect on chlorination on lower pH.

[0183] Conclusions with Viral FDH Dsg407

[0184] The viral halogenases is of particular interest as it showed a remarkable substrate tolerance against the initial 300 compound library. The two fungal halogenases halogenated 1% of the initial 300 compound library initially and we later developed a second hit-based which brought the number of hits up to 28-33. The viral halogenase Dsg407 however halogenated 10% of the initial 300 compound library (30 compounds), regioselectively, accepting even 3D substrates such as spiroindoles and thus going beyond the flat indolic structures that PrnA and other characterised halogenases show preference. More importantly, this enzyme is the first viral iodinase capable of also brominating and chlorinating in a pH dependent manner. A super-halogenase capable of incorporating all halogens (except fluorine) could provide the reason for a virus to keep it within its otherwise very minimal genome (FIG. 22).

[0185] We also determined kinetic parameters for this viral iodinase, at various pH against one of the non-native substrates that gave good yields, 6-azaindole. Steady state kinetics showed that iodination is the preferred activity of this enzyme and that it is a very competent biocatalyst when compared to other FDHs, the kinetic parameters of which have been shown against their natural substrate. There are several components of the assay that require further optimisation in order to explore the full biocatalytic capacity of this enzyme as we can see that there might be some limiting factors developing in our assay not enabling full conversion for the moment. A cofactor regeneration system and optimisation of enzyme stability for longer incubation times could greatly benefit the biotransformation. As with the other two halogenases, it is our most urgent goal to fully characterise most products possible to understand more about the regioselectivity of these halogenases. Furthermore, it would be very exciting to explore whether this halogenase could incorporate other pseudohalogens, including azides. Tentative experimental data (not included in this thesis) suggests that it may.

[0186] Dsg407 represents a game-changing enzyme in this area. From a fundamental viewpoint it is fascinating that a virus with a gemome 170 kb with strong purifying selection against genes that are of no use to the virus, encodes a biosynthetic modifying enzyme like a halogenase. Dsg407 represents almost 1% of its genome. This virus infects Synechococcus, one of the most abundant photosynthesiser in the planet. Although there have been a few publications in recent years where various researchers have tried to understand the functions of these metabolic genes through comparative genomics and transcriptomics, to our knowledge no one has established activity in vitro. This work represents the first biochemical and structural characterisation of such a metabolic gene from a bacterial phage, found to be a halogenase and more excitingly an iodinase capable of incorporating also bromine and chlorine, in a variety of structures.

[0187] General Experimental

[0188] All chemicals and solvents were purchased from Sigma Aldrich UK, Alpha Aesar UK, Fisher UK, Fluorochem UK or Apollo Scientific Japan. All chemicals were used when specified under nitrogen either wise all reactions were performed in clean, air-dried glassware.

[0189] ¹H NMR 500 MHz, ¹³C NMR 126 MHz and ¹⁹F NMR 470 MHz were recorded on Bruker 500 or 400 instrument at the University of St Andrews. Deuterated NMR solvents were purchased from Sigma Aldrich or Cambridge Isotope Laboratories Inc. and contained 99.8% atom % deuterium. Chemical shifts (δ) are listed in ppm relative to tetramethylsilane (TMS, δ=0.00) unless stated otherwise with all coupling constants J listed in Hz. High-resolution mass spectral (HRMS) analyses were acquired by electrospray ionisation (ESI), electron impact (EI) or chemical ionisation (CI) at the EPSRC National Mass Spectrometry Facility in Swansea University. Peaks are reported as m/z. TLC analysis was performed using Machery Nagel polyester backed sheets which were coated with silica 0.20 mm of thickness. Plates were using a model UVGL-58 MINERLIGHT® LAMP multiband UV-254/365 nm and/or by ninhydrin stain (50 mg of ninhydrin dissolved in 40 ml of acetone).

[0190] Evaporation of solvents was carried out on a Büchi Rotavapor® R-114 under reduced pressure. The pH of solutions was adjusted using a Fisherbrand Hydrus 300 pH meter with a two-point calibration (pH 4 and 7). Purified compounds were freeze-dried using an SCAVAC cool safe freeze-drier equipped with a Vacuubrand chemistry 158 hybrid pump RC6.

[0191] For the biological work, all chemical and biological reagents for buffers, media and stock solutions were purchased from commercial suppliers. No further purification took place and storage was according to the supplier's instructions. All microorganisms used in this work were stored at −80° C. for longer term storage. Biological work was carried under sterile conditions using either a Faster BH-EN class II vertical laminar airflow cabinet or a Bunsen flame. All surfaces, equipment and gloves were always disinfected with Distel (2% v/v). All microorganisms used in this work were stored at −80° C., in 700 μl of 50% glycerol in water combined with 300 μl of culture in sterilised 1.5 ml Eppendorf tubes. All media, buffers and glassware used for cultures were sterilised at 121° C. for 20 minutes in a Boxer Benchtop Denley autoclave prior to use. Pipetting of solutions and samples was done using LABNET Biopette autovclavable pipettes. pH measurements were taken using a Fisherbrand Hydrus 300 pH meter.

[0192] Standard UPLC Conditions

[0193] Samples were analysed by UHPLC using a Waters Acquity UHPLC system equipped with a Waters Acquity BEH C₁₈ 1.7 μm 2.1×50 mm column at 40° C. An injection volume of 5 μl was always used for all samples. The analytes were eluted using an initial solvent composition of 90% solvent A (0.1% TFA in water) and 10% solvent B (Acetonitrile) at a flow rate of 600 μL/min that was held for 0.5 mins. This was followed by a linear gradient to 95% solvent B over 1.5 minutes. This solvent composition was held for 0.9 mins before returning to initial conditions over 0.1 mins. The initial conditions were held for 1 minute before the next sample was injected. The elution was monitored by UV absorption or fluorescence response tuned to appropriate wavelengths.

[0194] Standard LCMS Conditions

[0195] Samples were analysed by a LC-HRMS2 using a Thermo Orbitrap Velop Pro system, equipped with a Waters Xbridge C₁₈ μm 2.1×100 mm column at 40° C. An injection volume of 5 μl was used for all samples. Analytes were eluted using an initial solvent composition of 90% water & 0.1% formic acid (solvent A) and 10% acetonitrile (solvent B) at a flow rate of 0.35 ml/min. This initial solvent composition was held for 1.5 mins followed by a linear gradient to 95% solvent B over 8 mins. This composition was held for another 2 minutes before returning to initial conditions over 0.5 mins. The eluted analyte was passed through a PDA detector monitoring absorbance at 220-800 nm (2 nm resolution, 10 Hz) and a valve which diverted eluted analyte to the waste. After the first minute, the valve was switched to pass the eluted analyte through to the inlet valve of the H-ESI source. The H-ESI source was set to positive ionisation mode using a 300° C. heater temperature, 350° C. capillary temperature, 50 U sheath gas flow, 20 U aux gas flow, 2 U sweep gas flow, 3.5 kV ionization voltage and 50% RF lens power. The scan cycle included one high-resolution survey scan and three data-dependent fragmentation scans. The survey scan was analysed in the orbitrap FTMS analyser at a resolution of 30,000 (at 400 m/z) over a range of 100-2000 m/z, based on a background ion corresponding to the [M+H]⁺ charge state of n-butyl-benzenesulfonamide (exact mass 214.08963) as a lock-mass for internal scan-by-scan calibration. The top three peaks from that scan, were then identified, isolated and subsequently fragmented under the CID (collision-induced dissociation) or HCD (higher energy collisional dissociation) modes at 35% normalized energy before fragments were analysed in the standard resolution ITMS analyser (CID) or high-resolution FTMS analyser (HCD).

[0196] General Experimental Procedures & Equipment for Molecular Biology

[0197] Reagents, enzymes, media components, buffers, and solvents were obtained from Sigma Aldrich, Alfa Aesar, Fisher, Formedium, Promega or Thermos Scientific. Microbial culturing was performed under sterile conditions maintained using a Faster BH-EN class II vertical laminar airflow cabinet or under a Bunsen flame. E. coli strains were stored at −80° C. in 20% glycerol. Sterilisation was performed by autoclaving at 121° C. for 20 minutes unless otherwise stated, or by passage through a 0.2 μm syringe filter. Primers were synthesised by Sigma Aldrich at 0.1 mmol scale and purified by desalting by the manufacturer. Synthetic genes were purchased from Invitrogen. DNA sequencing was performed by GATC Biotech. Melting temperatures (Tm) of primers was calculated using Thermo Fisher Multiple Primer Analyzer under default settings, considering only the annealing region of the primer. Restriction enzymes, DNA modifying enzymes, DNA polymerases, and DNA purification kits were used according to the manufacturer's instructions unless otherwise described.

[0198] Microbial cultures were incubated in New Brunswick Scientific I26 or I26R, Innova 4300, 44 or 42, or Stuart SI500 orbital incubator shakers or a Genlab static incubator. pH measurements were taken using a Fisherbrand Hydrus 300 pH meter. 18 MΩ water was generated using an ELGA Purelab Flex system fitted with 0.2 μm point-of-use filter. Autoclaving was performed using a Boxer Benchtop Denley autoclave. Pipetting was performed using LABNET Biopette or Eppendorf Xplorer pipettes, externally calabrated biennially by Starlab. Centrifugation was carried out using a Fisher Scientific accuSpin microcentrifuge, Thermo Scientific IEX CL30R centrifuge with T41 swinging bucket rotor, or Beckman JXN-26 centriguge with JS 5.3, JA 25.50, or JLA 8.100 rotors. PCR was performed using a Biorad T100 thermocycler. UV spectra were obtained using a BMG LABTECH FLUOstar OMEGA microplate reader using clear flat-bottomed 96-well plates or a quartz L-Vis plate. Electroporation was performed using a Bio-Rad Micropulser™. Sonication was performed using a Bandelin Sonoplus instrument with KE76 and MS73 flat titanium tips. Automated protein purification was performed using an GE Healthcare AKTA Pure FPLC (fast protein liquid chromatography) system equipped with GE Healthcare HiLoad 16/600 Superdex 75 pg or 200 pg columns; HPLC, UPLC, and LCMS were performed using equipment described in the chemical experimental procedures.

[0199] General In Silico Procedures

[0200] DNA sequences were obtained from either the EMBL-EBI (European bioinformatics institute) or the NCBI GenBank nucleotide database (National Center for Biotechnology Information). For halogenase sifting PHI-Blast was used against non-redundant protein sequences (nr). The BLAST software used to search for protein sequence homologues of known halogenases was either the NCBI blastp software using the non-redundant protein sequences database (nr) or the SIB BLAST Network Service (Swiss Institute of Bioinformatics). Multiple sequence alignments were performed either using ClustalW2 software (EMBL-EBI), MUSCLE (EMBL-EBI) or CLQ workbench. DNA sequences were translated into protein sequences using the ExPASy translate tool (Swiss institute bioinformatics). Branching analysis and phylogenetic trees were generated with CLQ workbench (Qiagen). Split decomposition was generated with SplitsTree software (Mathematisch-Naturwissnschaftiliche fakultat). Protein secondary structure was predicted using the online PSIPRED predictor from the Bloomsbury Centre for Bioinformatics from University College London. Homology models were generated using PHYRE2 Protein Fold server. Restriction endonuclease sites within nucleotide sequences were identified with NEBcutter software V2.0 (New England Biolabs). The theoretical melting temperatures (Tm) of PCR primer oligos were calculated using the Biomath Tm calculator (Promega); base-stacking melting temperatures were calculated under PCR master mix conditions adjusting for Mg2+ concentration (1.5 mM). Protein pl and extinction coefficient were calculated by ProtParam (expasy).

[0201] General Gene Synthesis

[0202] Genes were synthesised as linear DNA fragments, designed by reverse translation from a protein sequence. The sequence was codon optimised for expression in E. coli using the online Invitrogen GeneArt tools. Restriction sides aside from those that were used from cloning were removed during design. A glycine residue was introduced after starter methionine, respective to the N-end rule, to increase protein half-life. Genes were cloned into appropriate vectors and the full-length sequence was confirmed by DNA sequencing before doing any further work. For easy cloning into pUC19, 25-30 bp of pUC19 MCS regions were added at the 5′ and 3′-prime end of each synthetic gene.

[0203] Easy Cloning of Synthetic Genes (Strings) into pUC19

[0204] The cost of string synthesis is significantly lower than insertion into a vector by a supplier. In addition, the quantities of the synthetic gene can be a limiting factor for traditional restriction digest and ligation cloning into a vector. A template of 25-30 bp, identical to pUC19 MCS were added as flanking regions to the synthetic gene, allowing it to act as a primer in a PCR-amplification of the target plasmid, including restriction sites for EcoRI, NdeI.

[0205] For the vector preparation, all components were mixed on ice, in 50 μl reactions containing 37 μl sterile water, 5 μl 10× buffer E (Promega), 5 μl pUC19 (100 ng/μl), 1.5 μl of EcoRI, 1.5 μl of HindIII. The mixture was incubated at 37° Cover night or until complete digestion monitored by gel electrophoresis. In the reaction mixture, 1 μL of FastAP alkaline phosphatase (Thermo) was added and was further incubated for 60 mins. The mixture was purified with PCR clean up kit (Promega) and the product was analysed by agarose gel electrophoresis.

[0206] Once the vectors had been prepared, PCR amplification was performed. The following were mixed on ice in 100 μL reactions that were later divided into 4×25 μl aliquots. The components included 67 μl of sterile water, 20 μl of 5× Phusion HF buffer, 2 μl of pUC19 (digested by EcoRI/HindIII, FastAP treated) as 5-20 ng/μL, 2 μl of synthetic gene as 50 ng/μl in sterile water, 8 μl of dNTPs (2.5 mM stock) and 1 μl of Phusion DNA polymerase. In parallel a negative control was prepared and analysed which did not include synthetic gene. The PCR conditions included 30 sec of 98° C. as an initial denaturation step, followed by 30 cycles of denaturation for 15 sec at 98° C., gradient annealing temperature from 60-72° C. for 30 sec and an extension for 3 min at 72° C. After completion of the 30 cycles, PCR was extended for 10 mins at 72° C. and the samples were held at 12° C.

[0207] After completion of PCR, 0.5 μL of DpnI were added into each PCR reaction and the mixtures were again incubated at 37° C. overnight. 5 μl of each reaction and control were mixed together (control separately) and 5 μl of this mixture was used to tranform 100 μl of chemically competent DH10B-T1 cells.

[0208] Optimisation of Production Under T7lac Promoter

[0209] A 10 ml LB culture of E. coli BL21 cells (shortly before transformed with plasmid of choice under the control of T7 promoter) was used to inoculate fresh 10 ml LB cultures (X16) with appropriate antibiotic in sterile 50 ml falcon tubes and incubated with shaking (37° C., 180 rpm) until an of OD₆₀₀ of 0.4-0.6 (around 2 hours). Once this point was met, the tubes were divided and incubated for 10 mins in various temperatures (16° C., 28° C. and 37° C.). For each temperature, three out of four cultures were induced with either 1 mM, 0.5 or 0.1 mM IPTG (isopropyl-β-D-1-thiogalactopyranoside) final concentration, as well as no IPTG control for comparison when the T7 promoter was not induced. The cultures were left for 16 h at 16° C., 16 h at 28° C. and 4 more hours at 37° C. Following this, cells were harvested by centrifugation (using JLA 8.1000 rotor, 2000 g, 20 min, 4° C.) and frozen at −80° C. for at least 12 hours.

[0210] The pellets were lysed using chemical cell lysis and the lysates were then subjected to batch nickel purification (in 1.5 ml eppendorf tubes) by centrifugation. The lysates were equilibrated with nickel resin (Promega) using NiNTA buffer 1 (Sodium Phosphate 20 mM, Sodium Chloride 300 mM, 10 mM imidazole pH=7.4), followed by washing twice with NiNTA buffer 2 (Sodium Phosphate 20 mM, Sodium Chloride 300 mM, 25 mM imidazole pH=7.4) and finally eluting twice with NiNTA buffer 3 (Sodium Phosphate 20 mM, Sodium Chloride 300 mM, 250 mM imidazole pH=7.4). Pellet, lysate and samples from batch nickel purification were kept and analysed by SDS electrophoresis.

[0211] Culturing for Protein Production with Shaking Flasks for Dsg205, Dsg701 and Dsg407.

[0212] The plasmid harbouring the gene of interest was always pre-transformed fresh into BL21 (DE3) competent cells. A single colony was picked from the transformation plate and was used to inoculate a 10-mL culture in LB containing kanamycin, which was incubated overnight (37° C., 200 rpm). If more than 10 mL starter culture was needed for following steps, then multiple cultures were prepared and combined after overnight incubation. The starter culture was diluted 100-fold with fresh LB containing kanamycin and was then incubated (37° C., 200 rpm) until it reached an OD₆₀₀ of 0.4-0.6. The culture was then incubated at the temperature of protein production (typically 16° C.) with shaking at 200 rpm for 10 minutes. Once the incubator had reached the desired temperature, the appropriate amount of IPTG (0.5 mM) was added to the culture and was further incubated for another 16 h. Following this, cells were harvested by centrifugation (using JLA 8.1000 rotor, 2000 g, 20 min, 4° C.) and frozen at −80° C. for at least 12 hours.

[0213] Chemical Cell Lysis

[0214] For small scale cultures (<200 ml), sonication was not necessary, instead chemical cell lysis is more appropriate for such volumes. A pellet of cells was re-suspended in 0.1 vol of chemical lysis buffer (including 2 mg of lysozyme/ml of buffer used). If NiNTA purification was not to follow downstream, additional EDTA could also be added. The suspension was incubated on ice in the cold room (4° C.) for 1 h. Once a viscous solution could be observed, the sample was passed several times through a G23 gauge needle to loosen the mixture and the suspension was centrifuged to separate lysate from cell debris (16000 g, 20 mins, 4° C.). The supernatant was analysed straight away or stored at −80° C.

[0215] Cell Lysis by Sonication

[0216] Frozen pellets were thawed in a room temperature water bath until pellet had liquified and were transferred on ice and gently resuspended in lysis buffer (40 ml/L of culture). The portions of cell suspension were subjected to sonication on ice using the KE 76 titanium tapered tip was used for volumes of 100 ml of suspension per time, sonicating each sample for 2 cycles of 6 min at 40% power and 20% duty cycle. Samples were cooled on ice for at least 10 min between cycles. Cell lysate containing the protein of interest was harvested by centrifugation twice (using JA 25.50 rotor, 35,000g, 45 min, 4° C.) and the supernatant was either subjected to further purification steps or aliquoted and frozen in liquid nitrogen for storage at −80° C.

[0217] Removal of Imidazole During Binding Step

[0218] It is important to highlight that the column should only be loaded with 2.5 ml (MAX) of sample. Therefore, if the previous step has yielded more than 2.5 ml, the elution fractions should either be concentrated (if the protein is not too sensitive in higher concentrations) or multiple PD10 columns should be used. If the sample is less than 2.5 ml, add some storage buffer to the sample to a final volume of 2.5 ml.

[0219] Before sample application the column was equilibrated (with gravity protocol) using step additions of storage buffer (5 ml)×4 times. The flow though was discarded.

[0220] Once this step was completed and the column was equilibrated, 2.5 ml of the sample were loaded to the column and was left to bind the column until no more flow though was coming off the column. The flow though was discarded.

[0221] For elution of our protein, a 15 ml sterile falcon tube was placed carefully under the column. 3.5 ml of storage buffer were added and eluate was collected the protein concentration was calculated.

[0222] TEV Cleavage of Histidine Terminal Tag

[0223] After IMAC purification and buffer exchange (very important to include buffer exchange step to remove imidazole, as most of the FDHs used in this study precipitate overnight with increased concentration of imidazole) the protein and TEV were mixed in a 10:1 ratio (protein:TEV) and added in dialysis tubing. For a 10 ml of protein sample, 3 L of NiNTA lysis buffer were prepared. The dialysis bag containing the protein and TEV were added to the buffer and left dialysing in the cold room overnight with gentle stirring. For assessment of the efficiency of the his-tag cleavage, a small aliquot of the TEV/Protein sample was analysed with SDS against an aliquot of the uncleaved protein. Once the protein was completely digested by TEV protease, the protein sample was subjected to a second IMAC purification. The flowthrough was collected and analysed further, as it contained the his-tag cleaved protein.

[0224] Size Exclusion Chromatography

[0225] After NiNTA IMAC purification, the protein sample was concentrated to 5 mL using Merck Milipore Amicon® Ultra-15 10 kDa MWCO centrifugal filters and subjected to gel filtration using the GE AKTA pure FPLC system, typically equipped with the GE HiLoad 16/600 Superdex 200 pg column equilibrated and eluted with GF buffer, monitoring elution by UV absorbance at 280 nm. In a typical purification, the injection loop was washed with 5 volumes of GF buffer and the first 40 mL of eluate following injection were discarded. After this, the eluate was collected in fractions of 3 mL over an appropriate fractionation range for the protein of interest. Fractions containing the protein of interest were pooled, concentrated by ultracentrifugation or subjected to buffer exchange into Storage Buffer (as above) if necessary, aliquoted and frozen in liquid nitrogen for storage at −80° C.

[0226] Flavin-Reductase Assays

[0227] Flavin reductase enzyme PrnF was IMAC purified from cultures of E. coli BL21 RG-5066. Flavin reductase enzyme solution (1 μM) was added to an assay containing NADH (200 μM), FAD (30 μM), NaCl (50 mM), Tris-HCl (20 mM, pH 7.5) in a total volume of 1 ml. The PrnF enzyme was added half way through the time course and the decreasing absorbance of the assay was followed at 340 nm over either 20 or 30 minutes, corresponding to the oxidation of NADH. An assay containing no FAD was used as a blank.

[0228] Halogenation Assays Using Pure Dsg205

[0229] His₈-Dsg205 enzyme was purified from cultures of E. coli BL21 DSG205. 100 μl reactions were carried out using Ni-NTA purified Dsg205 and PrnF enzymes using a range of substrates from the initial 300 compound library or the “hit guided library” (10 mg/ml stock solutions in DMSO) with appropriate controls. 10 μM Dsg205, 1 μl of substrate (10 mg/ml), 10 mM NaCl, 1 μM PrnF, 5 mM NADH and HEPES buffer pH=7.2. For a full 96 well plate a 10 ml mastermix was prepared, which contained everything but NADH and the substrate. Each substrate was added to a specific position in the well using a multichannel pipette. The mastermix was added in a sterile plastic container and was added in each well of the plate. NADH was added last in each well. The plate was sealed with gas permeable tubing and the reactions were incubated at 30° C. for 90 minutes. Equal volumes methanol and were added to quench the reactions and plates were centrifuged for 1 h. The samples were analysed either by UPLC or LCMS method.

[0230] Halogenation Assays Using Crude Lysate Containing Dsg205

[0231] The same procedure was followed for assays with crude lysate of Dsg205, as with pure protein, but this time the enzyme was not purified, it was used directly after lysis or after the lysate had been flash frozen in droplets and stored at −80° C. The conditions included 100 μl of crude lysate containing also 1 μM PrnF, 5 mM NADH, 10 mM NaCl and 1 μl of the substrates (initial 300 compound library or hit guided library). The reactions were left incubating for 12 hours. Equal volumes methanol and were added to quench the reactions and plates were centrifuged for 1 h. The samples were analysed either by UPLC or LCMS method.

[0232] Halogenation Assays Using Pure Dsg701

[0233] His₈-Dsg701 enzyme was purified from cultures of E. coli BL21 DSG701. 100 μl reactions were carried out using Ni-NTA purified Dsg701 and PrnF enzymes using a range of substrates from the initial 300 compound library or the “hit guided library” (10 mg/ml stock solutions in DMSO) with appropriate controls. 10 μM Dsg701, 1μl of substrate (10 mg/ml), 10 mM NaBr, 1 μM PrnF, 5 mM NADH and HEPES buffer pH=7.2. For a full 96 well plate a 10 ml mastermix was prepared, which contained everything but NADH and the substrate. Each substrate was added to a specific position in the well using a multichannel pipette. The mastermix was added in a sterile plastic container and was added in each well of the plate. NADH was added last in each well. The plate was sealed with gas permeable tubing and the reactions were incubated at 30° C. for 90 minutes. Equal volumes methanol and were added to quench the reactions and plates were centrifuged for 1 h. The samples were analysed either by UPLC or LCMS method.

[0234] Halogenation Assays Using Crude Lysate Containing Dsg701

[0235] The same procedure was followed for assays with crude lysate of Dsg701, as with pure protein, but this time the enzyme was not purified, it was used directly after lysis or after the lysate had been flash frozen in droplets and stored at −80° C. The conditions included 100 μl of crude lysate containing also 1 μM PrnF, 5 mM NADH, 10 mM NaBr and 1 μl of the substrates (initial 300 compound library or hit guided library). The reactions were left incubating for 12 hours. Equal volumes methanol and were added to quench the reactions and plates were centrifuged for 1 h. The samples were analysed either by UPLC or LCMS method.

[0236] Halogenation Assays Using Pure Dsg407

[0237] His₈-Dsg407 enzyme was purified from cultures of E. coli BL21 DSG407. 100 μl reactions were carried out using Ni-NTA purified Dsg407 and PrnF enzymes using a range of substrates from the initial 300 compound library (10 mg/ml stock solutions in DMSO) with appropriate controls. 10 μM Dsg407, 1μl of substrate (10 mg/ml), 10 mM NaX (X=Cl, Br, I), 10 μM PrnF, 5 mM NADH and either a) 50 mM citric acid buffer at pH 3 for NaCl, b) 50 mM bicene at pH 8 for NaI or c) 50 mM HEPES at pH 7.4 for NaBr. For a full 96 well plate a 10 ml mastermix was prepared, which contained everything but NADH and the substrate. Each substrate was added to a specific position in the well using a multichannel pipette. The mastermix was added in a sterile plastic container and was added in each well of the plate. NADH was added last in each well. The plate was sealed with gas permeable tubing and the reactions were incubated at 30° C. for 90 minutes. Equal volumes methanol and were added to quench the reactions and plates were centrifuged for 1 h. The samples were analysed either by UPLC or LCMS method.

[0238] Halogenation Assays Using Crude Lysate Containing Dsg407

[0239] The same procedure was followed for assays with crude lysate of Dsg407, as with pure protein, but this time the enzyme was not purified, it was used directly after lysis or after the lysate had been flash frozen in droplets and stored at −80° C. It is important to note that the lysis buffer should contain the appropriate halogen salt at the appropriate pH. The conditions included 100 μl of crude lysate containing also 1 μM PrnF, 5 mM NADH, 10 mM halogen salt and 1 μl of the substrates (initial 300 compound library or hit guided library). The reactions were left incubating for 12 hours. Equal volumes methanol and were added to quench the reactions and plates were centrifuged for 1 h. The samples were analysed either by UPLC or LCMS method.

[0240] pH Screening for Dsg407

[0241] For the pH studies, the assay conditions were 10 μM Dsg407, 10 μM of FAD, 1 μl of substrate (10 mg/ml in DMSO), 10 mM of either NaBr, NaCl or NaI, 5 mM NADH, 10 μM of PrnF and 50 mM of the following buffers: a) for pH ranging between 7.5 to 9 we used 50 mM Bicene buffer b) for pH ranging between 5.8 to 7.5 we used sodium phosphate (NaH₂PO₄) buffer and c) for lower pH ranging from 3 to 5.8 we used citric acid-sodium citrate buffer. The assays were run in 96 well plates, at 100 μl assays. 1 μl of 6-azaindole was used (1 mg/ml stock in DMSO). The reactions were all run in triplicate for all three halogen salts for 90 mins at 30° C. The workup was performed carefully using a precalibrated multichannel pipette, for comparable sample preparations. Equal volumes methanol and were added to quench the reactions and plates were centrifuged for 1 h. The samples were analysed either by UPLC or LCMS method. Both starting material and halogenated product were monitored at 335 nm using the PDA detector of the Waters UPLC system.

1. A method of identifying or detecting amino acid sequences which potentially encode or provide halogenases, said method comprising probing or screening an amino acid sequence for the presence of a motif or consensus sequence/motif having the sequence:
(SEQ ID NO: 1)
Fx•Px•Sx•G
or
(SEQ ID NO: 2)
FxxPxxSxG;
wherein an amino acid sequence comprising said motif or consensus sequence, is an amino acid sequence which potentially encodes or provides a halogenase.

2. A method of identifying or detecting nucleic acid sequences which potentially encode halogenases, said method comprising probing or screening an nucleic acid sequence for the presence of a nucleic acid sequence which encodes the motif or consensus sequence/motif having the sequence:
(SEQ ID NO: 1)
Fx•Px•Sx•G
or
(SEQ ID NO: 2)
FxxPxxSxG;
wherein a nucleic acid sequence comprising a sequence which encodes said motif or consensus sequence, is a nucleic acid sequence which potentially encodes a halogenase.

3. The method of claim 1, wherein the halogenase exhibits a broad substrate specificity.

4. The method of claim 1, wherein the amino acid sequence or probed for the presence of the motif provided by SEQ ID NO: 1/2, is a sequence selected from the group consisting of:
(i) a deposited sequence;
(ii) an uncurated deposited sequence;
(iii) a hypothetical protein sequence;
(iv) an unannotated sequence;
(v) a prokaryotic sequence;
(vi) a eukaryotic sequence;
(vii) a sequence from a microorganism;
(viii) a bacterial sequence;
(ix) a viral sequence;
(x) a fungal sequence;
(xi) a plant sequence;
(xii) a mammalian sequence.

5. The method of claim 1, wherein the method is an in silico method.

6. The method of claim 1, wherein the method further comprises screening or probing the amino acid sequence for a motif having the sequence
(SEQ ID NO: 3)
GxGxxG;
and/or
(SEQ ID NO: 4)
WxWxIP

7. The method of claim 1, wherein the method comprises a further step in which an amino acid sequence identified as potentially encoding or providing a halogenase, is subjected to an assay to determine a level or presence of halogenase activity.

8. The method of claim 2, wherein a nucleic acid sequence identified as potentially encoding or providing a halogenase, is subject to a codon optimisation procedure to ensure that it is optimised for expressing in or within the chosen expression system.

9. A halogenase obtainable by the method of claim 1.

10. A halogenase encoded or provided by any one of the sequences of SEQ ID NOS: 5-149 or a functional fragment, variant or derivative thereof.

11. A halogenase comprising a sequence of any one of SEQ ID NOS: 5-149 or a functional fragment, variant or derivative thereof.

12. A halogenase comprising the sequence of SEQ ID NO: 7 or a functional fragment, variant or derivative thereof, or a nucleic acid sequence encoding SEQ ID NO: 7.

13. (canceled)

14. A method of halogenating a substrate, said method comprising contacting a substrate to be halogenated with one or more halogenases comprising any of the sequences provided by SEQ ID NOS: 5-149 or a functional fragment, variant or derivative thereof.

15. The method of claim 2, wherein the halogenase exhibits a broad substrate specificity.

16. The method of claim 2, wherein the nucleic acid sequence screened or probed for the presence of the motif provided by SEQ ID NO: 1/2, is a sequence selected from the group consisting of:
(i) a deposited sequence;
(ii) an uncurated deposited sequence;
(iii) a hypothetical protein sequence;
(iv) an unannotated sequence;
(v) a prokaryotic sequence;
(vi) a eukaryotic sequence;
(vii) a sequence from a microorganism;
(viii) a bacterial sequence;
(ix) a viral sequence;
(x) a fungal sequence;
(xi) a plant sequence;
(xii) a mammalian sequence.

17. The method of claim 2, wherein the method is an in silico method.

18. The method of claim 2, wherein the method further comprises screening or probing the nucleic acid sequence for a motif having the sequence encoding
(SEQ ID NO: 3)
GxGxxG;
and/or
(SEQ ID NO: 4)
WxWxIP.

19. A halogenase obtainable by the method of claim 2.

The application's sequence listing, which the Patent Office published only in electronic form, follows.

SEQUENCE LISTING (154 sequences)

SEQ ID NO: 1 - protein, 7 aa, Artificial Sequence
  Consensus
  MISC_FEATURE (1)..(7): Xaa is any amino acid residue
FXPXSXG

SEQ ID NO: 2 - protein, 9 aa, Artificial Sequence
  Consensus
  MISC_FEATURE (1)..(9): Xaa is any amino acid residue
FXXPXXSXG

SEQ ID NO: 3 - protein, 6 aa, Artificial Sequence
  Consensus
  MISC_FEATURE (1)..(6): Xaa is any amino acid residue
GXGXXG

SEQ ID NO: 4 - protein, 6 aa, Artificial Sequence
  Consensus
  MISC_FEATURE (1)..(6): Xaa is any amino acid residue
WXWXIP

SEQ ID NO: 5 - protein, 519 aa, Trichoderma virens
MAIPEKCTVLVVGGGPAGSYAAAALAREGIDTVILEADKFPRYHIGESMLASMRHFLRFIDVDSVFDSYGFTKKVGAAFKLNPKKREGYTDFLAAGGPENYAWNVVRSEADQLLFQHAAKSGAKAFDGVQVKSINFIDVPYKGPGQLPHDYPGRPVSATYVQKDDNTPREIKFDYIIDASGRVGILSTKHLKNRKYNQGLKNVATWGYWKGAGAYGKGTPRENSPFFEALQDESGWAWLIPLHNGTASVGIVMNQKMSVERKTQAGSPDSKTFYLDCLKELAPDLTKLMENGELITDIKSAADYSYSASGYAIPYARIAGDAGCFIDPYFSSGVHLAFVGGLSAAATIAAAIRGDCSEEAAADWHSKKIADAYIRFLLVVLSAYRQIRSQEEPVLSDINEDNFDRAFAFFRPVIQGIADVDTKLSQDELRKTLEFCSNAFEPVKPEDRTAMLEKLGKDPATAYQVDLSDQQRTVVDHIRARQMMRTEDTININSFGTDSINGFVPNLKRGELGLVPAKV

SEQ ID NO: 6 - protein, 574 aa, Pleurotus ostreatus
MASSTQPYTQPPKHVNVLIIGGGPAGTYAASALAREGIEVAVFEASKFPRYHIGESLIPSVRHYLRFIGAEEKLANHGFCRKPGSAIKFNQNKQEGYTDFVALGHNNNAWNVVRSEFDQMLMNHARSSGAAVYERTKVNSIEFSKSNPGRPTSVSWTHTPPPVPLSPPTSPQTKFKKLESNGDASEETSQVVEGVTTFDYMIDATGRAGIMSTKYLQNRRFNESLKNVAVWGYWENVGTYGVGTKREGAPWFEALTDETGWAWFIPLHNGTTSVGIVMNQKSHTDRTKQQVATGDGSSTMTSRYLENILLAPGLVDLIGEGKMVDGTVKSASDFSYSAPKYAGERYRIVGDAGAFIDPFFSSGIHLAMTSALAASASICASIRKDCTELEATEWHTKRVATSYTRFQVVVLSAYKQMRAQNFDVLSEIDEDNYDRAFAYLRPVIQGASEMGARLSEDELQRSLDFCLQLFNPTSPEQHERVFKQGGALARQLMDLSQPVMDTSLLLQQIKPLCGRRESPDTSEDSDSDVELVVKKINARRVVHPEYAINNLETEPLEGFAVRLERGNLGLIGKH

SEQ ID NO: 7 - protein, 530 aa, Cyanophage Syn10
MKIESVAIVGGGSSGWMTAAALSKLCPQLEIALIEDPNIKTVGVGESTLGHFNKFLHLLDLKDEDWMPACNATYKNSIRFTNFREGKGEVFEYPFGPSLDVSFFSQTDGINTWGKLANKYPEDFPPETFARFVNSNTYLAEHNRLTRNKDNKIPNFNFDWDTAYHIDAELFGQYLKEKIALPNGVKHIQGKVTGYQKESPNNHNFKYIILDQETAIFADLYIDCTGFKSLLLGEFMGEAFSPFSKKLANDKAMATRIPYENREEEMHNVTDCHAMKNGWVWNIPLWNRIGTGYCYSSRFVSKDDAEAEFREHLGERGKDAKIFHIDIGHGKRTRAWVNNCVGIGLSYGFIEPLESTGLLTTHENIENLVYLINQRDGYVTQAERDGFNYTCDHQIDSFSDFVAMHYAYSMRTDTPYWKWCTQMCNYMPESMGPHRQKQSTWQDLSTDTIGLNTWHINHNGISFIIAGHGLRPQSYDKLSEVLLKRNNESDYYYEDIRKDWLKHYESMVEYVKTLPTHYEFLRDEIYGSAE

SEQ ID NO: 8 - protein, 399 aa, campylobacter phage CP21
MKVTVIGKGTAGILTTKSLRFNFPDLEIDWIYPESNKFIGVGEALVPASSKFLKTIGVDNKMILKDFRGSIKAGLKMIGWADKTFNLPFDNSVLLNRYMNKDLFPENFINFENVSHHFNTFSLQNLYVENINNINKTVTSFKDIDSDLIVDCRGFQDSDDFIEPGILKNNIALTTRIPVQNFLNPYSSFFARDFGWCWTIPLQDYISIGYVTNDSFINQASEDLKKHLQENFKTDLKDYNTIKFKTGYKKQQIAKIEGHNVFSVGLNAAFVEPLQSTGLWLASQQIQELINYIKNGDTNWNQRFEDMYNRVYQFILNHFILCKKSNEYWDYYKNFNFKDSLFTGSNGNNVFDGEFENFLYDSFQGKSVKYNIDKNIVGGKAALTKLKKFDELLRDYLSK

SEQ ID NO: 9 - protein, 983 aa, Oidiodendron maius
MSVPDTCTVLVVGGGPAGSFAAAALARDGIDVVLVDADKFPRYHIGESMLPSIRHFLKFIDCDDKWINHGFIKKKGAAFKLNWTQPDAYTDFIAAAGPNGYAWNVIRSESDEILFKHAGECGAHIFDATKIESINFVEDAETKEAWDSDLPNPGRPVSAIWARKDGSTGLIAFKYLIDASGRQGISSTKYLKNRKFNQSLKNIANWGYWTGAGVYGVGTHKEGSPYFEALKDASGWCWFIPLHDGTVSVGIVQNQEQATAKKRAQGSPSSKDFYLNSLDLVPGVKALCGQGTLVSDIKSASDWSYTASSYAFPYARIIGDAGCFIDPFFSSGVHLAILGGLSAAVTIAGSMRGDCDEKTAALWHSKKITESYTRFFLVVSSALKQIRSQEEPVINDIDEEGFQRAFDLFKPVIQGTVDADSNGRFTQADISKAMEFCFKAFTHVTPEEKDALVEKLKSYGLDARADDESTQKAIDEIEKNLTAEELQVLNILRSRRMVREDGYNIDSFTLDAVDGLSPNMVRGKLGLKKAESVKLNISNLYSIDYLEGKTPGVRVPNSQDSSKESMNGHGLNEHSNGIENSMKEGITGSVNGSMRNGTPATREELEGMVKLITPLNNFGSAMDDLHRHALMSALYQAAESLETPFDTLMRFSNSRYQLSLIKVGYQLGVFEALVASSAALTAEELAKHTGADPKLVSRVVRYLAANRIIVELGENLYEANKITKYMADPHMEGGMKYFHTVSSPTVHKLPEFLQENNFQNPIGEPSVWHKSKNTAMNLFAWLKANQPETLKHLHNLRAFPKERNWLSCIPFAQFSETDRIAFVGMGRNVEHECLRLKEAHPKLAGRIVLQHLPETPQHAPMIKDVTFISHDIFTPQPVKGAQYYYLRRTLHHWSDEQVVEILRNLVPAMALDSQVLIDEIVLPNTAASAPPAAHDLEMMIMFGAMERTINQWNVLLDHAGLKAVEVKTYEIAMQSSIIFAQLK

SEQ ID NO: 10 - protein, 500 aa, Candidatus pelagibacter
MSVNKITVLGGGTAGLVSALVLKARFEKLNIEVVKSDNIGIIGVGEGSTEHWKDFMEFIGVPLKELLLETDATFKYGIMFEDWTKEPYFHNITNELHKVALGQYYAGYAYATINKLKPDEYTSGHCFNNEVLPNYIPSQFHFNTHKLNTFLLKKCKDFGIEVHTDDITDVETDNHGIKRIRGDKGWYESDFYIDCTGFKKYLISKLGAKWVSYKDYLPMNEAIAFPTPDTDEYTPYTLAKAMSSGWMWRIPTYGRWGNGYVFDNRYINAEQAQKECEDYLGFKVNVAKNIKFDAGALDRPWIGNCVAMGLCASFIEPLEASSIGTSIQQSFLLMHTLINYKQTDIDQYNTKVGHIVENIRDFVLLHYIVKRNDSKFWKELKVNLPDSLKHNLDKWSDRMPIKEDFKTDYVLFNAQNFAVLLKELELANIDSLKREYDMLVEHNKNVVKKEVDHHIKTFKTDPMNKQCPIMGHKQYLMKLRSGKETLNQQIDYLQNENSNT

SEQ ID NO: 11 - protein, 511 aa, Unknown
  Eukaryarchaeota archaeon
MKIKNVCIVGGGTTGWMMAVALNVNVPNLKVTLVESEEIPSIGVGEATIPLTAKFISSVLKFDEKEWMAASDATYKTAIRFNNFSKIDESFWHPFWSDDEIHYNTYDWLIKRQIEDLPTEDFYKSNFIAWYMSMDKRFQEIKGFQHAHHMDANKFARYCQTQFKGTHINATVSSVEEKDGYIKSITVDGKKIKSDLFIDCTGFNALLIGETLNEPYTSYEDTLLNDSALVCRIPYGNDPFTNRQQECHPFTDCTALSSGWVFNTPVWSRTGTGYVYSSKFQSREDAEQEFRIYLVDRFGGDRGDIAEFRHISFKTGKYERSWVNNCLALTLASGFIEPLESTGLALACWQIENFIDVLKDDDMSSFIRATYNDKVNMAYDEIHTFIAMHYANTKREDTEYWKHIKNNLHITQKMVDYAKNDNVPDIWFPKKSRECVLIGLDIPSEYSKQHITWHGENFESIMKSDDNEKEFMTAGVQYLNGRKNMYQSISNDMPWHEDYLKEHIHVESEDS

SEQ ID NO: 12 - protein, 493 aa, Unknown
  Verrucomicrobia bacterium
MSSKNKKLIVLGGGTAGWLTALFLNKIFPKYETTLIESKQVGIIGVGEATTPNIIYMLDYLNINLSELISETKGSIKNGINFENWNGDGKKYFHGFYERLADFSVPPIFKGDCWNHYLNNLISKKLDFNTHTYITKLSYENKVDVHKTSYALHFDTNLLSEYLHKTGVDRGIKYVNGKLKKVHSSNLNDNINKITLTNNKSYSCDFIFDCSGFSRLLIGKHFGVKWKSYKQHLPMKKAIPFWLKQTGNIQPYTTALAMKYGWIWKIPLQHRIGSGYIFDSNYINDDQALKEAEKTLNTKLEVNKIIDFEAGRYESFWHENCIALGLASSFIEPLESTSIFLTIQQLFNLNHFLGDMFKENKNSKALYNEMSNKNMDETLNFVYLHYLTKRNDSPFWKNFRKDYPPPTNFRHVLSLIRSGNLRFLDIEEVKKTAAFPISSYLMVAYGLGLFNKKPNMIYYKNIVPTISQYLDAIKQATDQATPLNIFLDHVNYK

SEQ ID NO: 13 - protein, 541 aa, Sclerotinia borealis
MSVPTQTSVLVVGGGPAGSYAASLLGREGVDVVLLEADKFPRYHVGESMLASMRFFLRFIDLEKTFDDHGFEKKFGATFKITTKKEAYTDFAASLGKGGHSWNVVRSESDELLFKHAGKSGAKTFDQTKVDSLQFEPYSRDRFTAEDHLANPGRPVSAAWSRKDGTSGTINFDYLIDGSGRNGIISTKYLKNRRFNEGLKNIAIWSYWKGAERYKQGEDNENSPFFEALTDGSGWVWAIPLHNGTLSVGIAARQDFFFERKKTSKLEGKAFYTEYLDLAPGIQQLLKNAEIVSELKQASDWSYSASAYAGPHFRIIGDAGCFVDPYFSSGVHLALTSGLSAAISVQAARRGQADEWSAAKWHTTKVSEGYTRFLLLVMTVLRQLRMKEAHLITTEQEEGFDMAFKKIQPVIQGVADTETDDARVQKNAAEAVDFSLDSFEVTPEKQRAVIDKIEKAQTAPETLEKLTPEEVHILGGIVTRTFEREKDELNLTSFTGDVIEGLSANLVRGDLGLIRKGKKTVTPETTATMEMLAVESIKSVA

SEQ ID NO: 14 - protein, 554 aa, Unknown
  Euryarchaeota archaeon
MKVEEPDHFIEFENFDPYKGKIESVVIVGGGSSGWMTAAALAKLCPHLEVALVESKDIKTIGVGESTLGHFNQYLELLDLKDEDWMPHADATYKNGIQFTNFREGKEEVFQYPFYTDYDLTYAPQGINTWAHLANMFPKDFPPESFAEFYCANTFLCNENKQTRNFDNVVRQFDFRRHTAYHLDATKFGIYLRDHICLPNGVQHILGEITGFQTMYEKPNDQTISYLVMDGINAIQADLFIDCTGFKSKLLGGFQGIPFIPAENKLANDKAWAVRIPYEEETREKEMRNVTDCWAMKNGWTWDIPLWNRIGKGYVYSSRFCRKESAKQEFIKHLRHTVGKKRADAAELFHIDIEHGRRQRAWVNNVVGIGLSYGFVEPLESTGLLTTHENILRLVTTLNQRDGYVTRTEKEGFNWICNYTLDNFIDFVAMHYAFSMRTDTPYWRWCTQQNFYNPESVTQNVPVHQSIEQFVSSTLGEGWHPNMNGIPFIAAGHGIKSSSYLKRTQYLLGELMADTDHLEDKRKKYLQWKEYIEKYVAQLPSHYEFLRDEIYGTP

SEQ ID NO: 15 - protein, 537 aa, Unknown
  Euryarchaeota archaeon
MRVESIVIVGGGSSGWMAAAMLSKTFPKMQIGLIESEQGPIGVGESTLGHFNRFLKRLGLKDKDWMSYCNATYKTSIAFKNFRHGEGERFQYPFGEFDLFDYKDTLQRYFELGCKYGVDKYPPDEFANFANNQTYLADQCKISADPIPECTYDMDRDTAYHFDAGLFGNYLRDHHCIPNGVMHLKGEIEKVMKNPDGSIDSLVTTQDGLIKADLYIDCTGFKSLLLEQHMGSEFISFKDKLFNDTALATQIPYSDRENQMETYTDCVAMNAGWVWNIPLWHRVGTGYVYSSDYINECEAEVEFRKYLSERYTPEIAQDAKLRKINIKHGKHEKAWVKNVVGIGLAYGFLEPLESTGLMTTHENILLLCDTLQRRQGFYSRFEQDSFNYNCDNMIESMKNFVALHYALSQRDDNKYWRDCTNINFDIDPLWKQSTRVAHSNVVTMLDNLEDAFYNLEQHSGSIYIAAGQGYRPFSEGMFEERMSADKESDEWSSILEEIHTKYQQDRKIMMEWVDKLPSHYEYLRDNIYDLQEEETVG

SEQ ID NO: 16 - protein, 368 aa, Gaeumannomyces tritici
MASVPQSCTVLVVGGGPGGSYASAALAREGIDVVLLESEKFPRYHIGESMLPSMRHFLKFIDGYEKFNAHGFNIKKGGAFRLNWARPESYTDFVAAGGPEGYAWNVVRSEADEIMFKHAASCGVKTFDATKVTSVEFSPPSSPEEELGRPVSATWSRKDGSSGAISFRYLVDASGRAGLLSTKYMKNRHYNQGLKNVASWAYWKGGGTHAVGTHKEGAPYFEALKDASGWVWFIPLHNGTHSVGVVQNQDIATEKKRAMAEPSARGLYEQSLDLVPGIRALLSKAEMVSDVKSASDWSYSASRYALPGARIVGDAGSFIDPFFSSGVHLALAGGLAAATTIAAVLRGDCDEATAASWAPPTPTLRVAA

SEQ ID NO: 17 - protein, 581 aa, Armillaria ostroyae
MHDNRLWVFLEHWCLLFWPACRSRYTSYLSPPIPYITRKNLAISIQQLIVNRLWFQLNAMIPTKTTVLVVGGGPGGSYAAAVLARENVDVVILEADKFPRYHVGESQLAALRHFLRFIDLEKEFDAYGFQRKVGGAFKLNRHKREGYSDFISHDPKNYSWHVIRSESDELMLRYASRVGAKVFEETKVTDIEFGTPVEGQETRPVAALWKGKNGDTGRIQFDYIIDASGRTGILSTQYLKNREFNNKLMNVAFWGYWTGAGRYMAGTPREDSIFVEALTDETGWVWFIPLHDGTTSVGVVMDQEKSNLMRAAVKEARGDSSSSAHYLRQLELAPAIRELMVDAKLIKKPDAPLVSSASDYSYAARYHAGPGYRIIGDAGAFIDPFFSSGVHLAVSGGLSAAATICAVMKGECSELDAARWHTTKLNSSYTRFMLVVLSAYHQIRSQDSPILSAQEDDNFDLAFEFFRPIIQGNTESGGKFADDNLGKTIDFLGKHVFEPSYPEQRAELVALYGDQLDAVPKARVPGDNEAKAETKTILKHMAVQKLIRMEDVAHIGNYVSDVFEGHRLRLKRGELGLDKAA

SEQ ID NO: 18 - protein, 516 aa, Gymnopus luxurians
MASTHTSTIPATATVLIIGGGPGGSYAAAVLAREGINVLLLEADKFPRYHVGESQLASLRHFLRFIDLEKEFENHGFTQKHGAAFKLDKHKREGYTDFVFDDPKNYSWNTVRSESDELMLRHAARSGATVIEETRVMEIEWDDARPMAATWKNTQSGQMGQVKFDYLIDASGRAGICSVKYLKNRHYNPDFKNVAFWTYWSGCGEYKPGTSRAGSPYFEALSDESGWAWFIPLHIGTSVGVVVKQELSDEKRATAKTRGLDSSLYGHYMRLLDSAPNIKAMIANAAIIKNNNEIVVRTASDYSYHSDSYAGPHYRIIGDAGAFIDPYLSSGVHLAISSGLSAAASICSSLKGECSEDDAIRFHNAKIDASYTRFVLIIKSVYEHIRSQKATTLSSATEDNFDDAFLMFRPVIQGRIDSSLSLSEEDKTRLVHFYSRHAFEPSMPEERHNLLKEFGDPVKSFNNADDIHSKAILRSMAVRKLLSVDETNHIDNYVADVVEGFRLRLERGNIGIEKCR

SEQ ID NO: 19 - protein, 521 aa, Mycena chlorophos
MSVPASAKVLVIGGGPGGSYAATCLARENVDVVLLEADKFPRYHVGESQLASLRYFLRFVDLEQQFEDFGFQKKPGAAFKLNQNKREGYTDFTAKDPANYSWNLVRSLSDELMLRHAAKSGANVIEETKVTEVEFKGEGDAAQPVAAVWKNKAGETGKITFDFVIDASGRNGIISSKYKKTRVFNDNLLNVASWGYWKGTGRYAVGTSRENGPFFESLTDESGWAWFIPLHDGTTSVGVVQNQDISNKKRAEAKERGEDSSTSAHYHRELDLAPAVRVLMGEATMVKKPDAPMISAASDYSYHASAYAGPHYRLVGDAACFIDPFFSSGVHLAISGGLSAAASVCAVINGQATDAEAQVYHHQKVDAAYKRFLLVVLSAYQQIRVQNVPVYSNENNFDEAFHFFRPIIQGNTDTGKQLAGDDLKKTVEFLGTHAFEPSLPEERTQIFAKYGEEVDKLPPSMTDDNVEDTRARNILQGIAIRKLMRTEDTLHINNETVDILGGLRMVMKRGSLGLEKAEVMA

SEQ ID NO: 20 - protein, 492 aa, Pseudoaltermonas byunsanensis
MTATLINQAYNKHHKLVDIRLIESPDVDIIGVGEATVPAIKDFLQAAGIDEAEFMNYCNATFKNGIMFENWRQPKHGKMHRYVHPFDFERVEKRLDIATSWVLSERQRPFDESVSLASTLIQHNLTPKTRTTKPYHGIVHYSYHMDARLFGQFLRQRAMAAGVTRIEAHVESVNTDNGQISSIATTQGLFESDLFIDCTGFRALLISALEEKSSNWRSYQDELMCDSAVTVQIPHSEEHIPRSYTVAHALSCGWAWSIDLQNRTGNGYVYSSKYCSKEQAELEFRNYLKLDNNVALNHIDMSVGRRKRHWIGNCVAIGLAGGFIEPLESTGLHLIFLAARFLVLHNNFQYCEANIAGFNQTMNATYDELKDFIVTHYVLSDRDDSDFWRDISKTLDACPQLAQKLDLWQSKVCEFFDVSNSTSHMFTDTSYRYILFGMDHIPQIKIPYFDGEFTDVFEFVKSRQQKAVAIALNHVDYFSYDVKGQVTVKLSQ

SEQ ID NO: 21 - protein, 507 aa, Unknown
  Gammaproteobacteria bacterium
MPQKAIKTLVIVGGGSAGWMSASFLNHIFNLKEKQIDIKLIESSEVETIGVGEATIHSIRFFLSTIGISEREFMQKTQAIFKHGILFKDWSGQEKDEYYHPFEHPKVNDGIDVVRHWVNLNSNTEKSSRFDFSVSAQSLCASQNKSPKSQGNKDFEGYFPYGYHLDAAKFAHFLRDFSLTKGVKRIEGHVQEVILGTDGDIQRLILKNGLQIDGDFFIDCTGFSSVLMKAMGNKEWVDYSDSLLCDRAVTCQLEHNKENQEHRPYTIATAQKSGWIWDIDLQSRRGMGYVYSSSFCSTEQAEIDLSVYANTAREKLSFKHLQMKTGRMEKIWFKNCLAIGLSAGFIEPLESTGIYFIDMGIRFFGDYITSGNVNTLLIDKYNTVMGQLMDQSKDFISLHYTLSKRNDSQFWRAYQHDVPISETLSANLTLWKHKIPTAIDFSAQITQFTSANYTYILYGMKYFPEPAVTSNLFTSEDRSMKNIEYVKSRSNQMNNKLPTMSQFLKNI

SEQ ID NO: 22 - protein, 498 aa, Asticcacaulis sp.
MFMNSVQQQEIVILGGGAAGWIAAALLARKTDRSQTRVTLVESEEIGIIGVGEATVPVLAHCNALLGIDEYDFIRNTQGTFKLGIEFCDWGVAGNRHFHAFSDYGHQVDGVSTHHYWLRLRQSGDAHPIDDYSFAYAVAKNNNFAPTDPQNPRYHHAYHFDAALYARYLRDVATGQGVQRIEGKMTHFDLESASGNITAIHLANGSRVPGDLFLDCTGFASELLGKALETPFVDWSRWLLCNSAMAVPSKRTGAPMPFTRSTAHAGGWRWTIPLQHRCGHGMVYNSDLWSDDAARDALTGNVDGELLAEPRVFRFTSGHRKQFWNRNCVGIGFASSFLEPLESTGLQLIVQGVLKLLQFFPQRIIDPVLRDEYNRISTREIERIRDFIIAHYYLSRRPEPLWAACRNIEVPDSLRHKLEVWNASGQIALGDLESYMEPSWLAILLGNGVVPARYAVAADLYPLEQIRKGMKLRREEIVRSAQAVTSHQDFIDQYCKAP

SEQ ID NO: 23 - protein, 516 aa, Marinomonas mediterranea
MKKRIAIIGAGLSGIAAIKQLTDEGHHVVCYEKAESFGGVFAAKKIYEDLHLTISNYFMAYSDFLPTEQSLKFWSKQEYVQYLKRYLAHFDIEKHIVYNHKVVNAEQNGDKWTVKVQSGSGEETESEFDMVVVCSGHFQEPKTPDLEGLSDFMGDIIHSNDYRDKMAFKGKRVMCVGLGESSADITSEISEVAEKCILSLRRYPAVAPRYMAFQEDPYFTIDTSWLTSRIVNKLPFSYHRGITKNIFHKYVNSRNLHLRIRGEWLHKSGPSIHQAVTKNERLFKPIAEGKVLPNIGGIERFEGNTVIFKDGTHEEIDAIVFCTGYKLSFPFLQHKIECMRDLYKQIFIPSVGSSLAFVGFVRPQQGGIPVIAEMQSRYLAQLASGVKSLPSLEKQKEVIMEDANHWETEYHITPHVASLVNYCHYMDSMARLVGCMPKTPSLLKDPLLRVKLLHNPQFAAQYRLEGPHPMSESSRDFLVNFPNISTWPRIIHFECALAMQKLLSFLSMDNLRELKK

SEQ ID NO: 24 - protein, 522 aa, Armillaria solidipes
MIPTKTAVLVVGGGPGGSYAAAVLARENVDVVVLEADKFPRYHVGESQLAALRHFLRFIDLEKEFDAYGFQRKVGGAFKLNRHKREGYSDFISHDPKNYSWHVIRSESDELMLRYASRVGAKVFEETKVTDIEFGTPVEGQETRPVAALWKGKDGDTGRIQFDYIIDASGRTGILSTQYLKNREFNNKLMNVAFWGYWTGAGRYMAGTPREDSIFVEALTDETGWVWFIPLHDGTTSVGVVMDQEKSNLMRATVKEARGDSSSSAHYLRQLELAPAIRELMVDAKLIKKPDAPLVSSASDYSYAARYHAGPGYRIIGDAGAFIDPFFSSGVHLAVSGGLSAAATICAVMKGECSELDAARWHTTKLHSSYTRFMLVVLSAYHQIRSQDSPILSAQEDDNFDLAFEFFRPIIQGNTESGSKFADDNLGKTIEFLGKHVFEPSYPEQRAELVALYGDQLDAVPKARVPGDNEAKAETKTILKHMAVQKLIRMEDVAHIRNYVSDVFEGHRLRLKRGELGLDKAA

SEQ ID NO: 25 - protein, 528 aa, Colletotrichum higginsianum
MSPAIPERCTVLVIGGGPGGSYAASALAREGIDVVVLEGDKFPRYHIGESMLASMRHMLRFIDLEAKFDSYGFIKKPGASFKLNKDKRPGYTDFLAAGGPNNYAWNVVRSEADQLMFHHAGECGAKIFDAVKIKSIRFEDATTVPEGEPNLNPGRPVAAVYEVAETKETGEIAFDYVVDASGRVGLLSTKYMKNRRYNQGLKNVANWGYWEGCNKFSPGTPRENSPFFEALTDESGWAWFIPLHNGKASVGVVMNQKLAAHKKQQGGFNSTEFYHESLKLAPELLSVLVGDGKFVSDVKSASDYSYSASSYAFPNARIVGDAGCFIDPFFSSGVHIALTGALSAATTIAASIRGDSEEATAAEWHSKKVAAAYTRFLLVVLSAYKQMRFQGDPVLSDFDEDNFDRAFSFFRPIIQGTADAANGNLSQDELNKTLEFCAHAFEPVNPEANQEKVMKAVSAAPAGSDYNPDLSVEEQNAVNHIRARKMMRTEDTFNINTFGTDSIVGYVPNLVRGSLGLKKAETNGVVAA

SEQ ID NO: 26 - protein, 527 aa, Suillus luteus
MAGQTLPTSTQILIVGGGPAGSYAAAALAREGFEVTLLEAVQFPRYHIGESLLPSVRHFLAFIGAEESIMNYGFTVKPGAAVKLNQFKREGYTDFVALNPNNGSWNVIRSEFDDLLFRHASNSGATVFDNTRVTEFQFEGERPVSASWRNAITGVEGRISFSYLVDASGRNGIMSTKYLKNRRYNKALNNVACWGYWDGTGSYMPGTTRENAIFVEALKDESGWAWFIPLHDGSTSVGIVMDSESSNRKKKASRAASGGSGSNILAHYKEELLSRAPGVLKLIGTATLRNDGTPEAVKSASDFSYSAPSYAGDHFRLAGDSGAFIDPFFSSGVHLAFTGGLSAALTIAASIRGFCSEEDAQRWHTSKIATSYTRFLLVVLGTYKQIRNQAMPVMSDVDEDNFDRAFDLIRPVIQGTADVGKALTEDELQKTMDFCRHLFAPTNPEMHSAVKARLDPSLTSPDAPVMTESDIDSLLGDADEEAKLVLSEINARKPIHTMYNPTENFGVEAHFGFKAVLERGKLGLAST

SEQ ID NO: 27 - protein, 524 aa, Streptomyces glaucescens
MSMRKSVCVIGAGPSGLVAIKELLDEGHSVTCFEHSAELGGVFRAEVGADEAGAYDSTMLTISNYMMTFSSFPPPQGQDRRYWSAGEYRQYLLDFAEKFGLGPAIRYRTDVLSVSRNDSGGYTVEVAPVDDPEGRAAHQFDAVVISTGTHRVPNYIDLPGQEEFAGEIVHSAHYRNADRFRGKRVLCVGIGETAADVVNEIAQVAASCTLSVRRYQPIVERYPGDRPFTNDAYTSHLLHSVPLAAAGPLMHLGMKRNRTRGKTAAARAVAAWNANNPDFFHHFLTKNDAFVHRIVDGTLTVDASGIQRLGKDYVVFRSGRRETIDTVMLNTGYTEDFSILKDVDVTDVRRLYKHMIHPELGTGVVFIGWARPAAGGVPACSEMQSRYFALLCSGKKKLPDRVRLQGLIERQAAYENEVFHGNPDLRTLVHYNHYMIDFAKVIGCSPWRPSLLLDPRLALRLWCGSQTPHVYRLSGPHSDRRTARRTVMSLPPAFTPAQIALTTAVSAVSRVLIRLGLMKADPVY

SEQ ID NO: 28 - protein, 531 aa, Moritella viscosa
MSKRIIMQTQQKNICVIGAGCSGLVAIKELLDEGHQVTCFETLDKPGGNFYCSDNVEISGSYDSTMLTISNYMMAYSSYPPALSEQRKFWSAREYQEYLLDFTKHFSLDQHITYENAVNNVKKLDNGKFHVDVRSTHDETQVSSFTFDAIAVCTGSSRVPKYIDIKGLETFKGDVYHSAFYKNSKPYTGRSALCIGMGETGVDVASEIAGVAGKCMLSLRQRQPSVERFPLAKEHPSDAYTSHFLYAMPVSAGNARMKLQFKAMKKFGKEEKTRAFADWNLKAGNYFNYFNLKSDVFVDRIVDNKMAVNTSGIDYLGEDYVAFNDGHKESIDMIMLNTGYTDKFDFLEDIKLPDMRQLYKHMIHPDLGCDIVFIGWARPAVGGVPACSEMQSRYFALLCSGKKQLPEMHKLKQLIAQQAFYEDEVYFKNRNVRSLVHYTGYMADFSKVIGCSPWRLSTFLNPILTYRLWVGSQMPSFYRLYGPHSNYDKAKKSIFNVPIAFNLIEAAVLTTYTLLTRGLATLGIIKADPKY

SEQ ID NO: 29 - protein, 1013 aa, Chaetomium globosum
MSIPQSCTVLVVGGGPAGSFASAALAREGIDVVMLEADKHPRYHIGESMLPSMRHFLEFIDCYEQFNAHGFIKKNGAAFRLNKTQPEAFTDFIAAGGPNGHAWNVVRSEADELLFNHAASCGVRAFQTTKVDAVQFEESDGETAGPGRPVSASWKRKDGTTGTIAFKYMVDASGRYGLLSTKYLKNRKFNQSLKNIANWAYWKGGGIYAEGTHKAGSPFFEALQDASGWCWFIPLHDGTHSIGIVQNQEMATEKKRAAGSPSTKEFYTQSLDLAPGIKALLSKAEVVSDVKSASDWSYSADTYAFPYARIAGDAGAFIDPFFSSGVHLAVLGGVSAAVTIAASIRGDCDEKAAASWHSKKTAESYTRFFLVVSSALKQIRMQEDPVIQDLDEEGFQRAFDLFRPVIQGTVDAHHNGKLTQSEISNTVEFCFKAFTHVTPEQKDAVVNKLRKLSANAEAGDEETIDNALGEIEKSLTPDELQVLNILRGRRMIREDGYNMDSFTLDTIDGLAPRMERGKLGLAKSQAARLSKAHLYSADYLEGKRPGVRVVQPAKSMNGANGHSNGEANGHTNAANGTNGVNGANGTNGHTKEHANGHENGSGMNGAAKATFNAANGAGLFASPINGQAAQLDDVGRHALMNTLHEAAENLETPFDLVMRLGNSARLLTYIRVAHTLNLFATLSNASPTPVPLTTLTSTGPAPGAAPTFIRRVLVFLAANRLIGEAGPDLFVATKATHSLALPGVAGGATFYQGVIAPMTQYLPESPLAKCGYVQRAGEPAVFDSWSAGVEGGGRGLWPYLKGRPEMLGAFQELMALDRGGGDWVGCVDFEGVDSPSLVMGGEGGGGSERVVFVDVGGNVGHQARRLVERHPRLAGRVVVQDLPETVAAAPAAKGVAFLAHDFFEPQPVRGARYYYLRSVLHNWGDAQAVEILKNVAAAMVEDSRVLIDEMVVPDKSADVLVAGQDLNMMLLFGGMERRTDDWAALLDRVGLKIVEVKMYGPVTKNSIIVAMLK

SEQ ID NO: 30 - protein, 971 aa, Pseudomassariella vexata
MIATIPEKCTVLVVGGGPAGSYAASALAREGIDVVLLEADKFPRYHIGESMLPSMRHFLKFIDAYEKWDAYGFNIKKGGAFRLNWSRPETYTDFVAAGGPGGYAWNVVRSEADELLFKHAAECGVKTFDETKVASIEFAEPASSDSQNFGRPVSATWTRKDGTTGTISLDYVVDASGRAGLISTKYLKNRSYNQGSKNIASWGYWKGGGVHGVGTFKEGAPYFEALKDGSGWVWFIPLHNGKHSVGIVQNQEMATKKKREMAEPSSAGFYKQSLELVPGIKELLANAELVSDIKSASDWSYSASSYAFPGVRIAGDAGSFIDPFFSSGVHLALSGGLSSATTIAAAIRGDCNEEKAASWHDKKTAESYTRFLVVVSSALKQIRSQDQPIINDFDEQSFERAFDLFRPIIQGQVDADARGKLSQAEISKTVEFCFKAFAHVSFEEKEALIAKLKQLGLDGDAYDESNRAALDAIEKKLTAEEQSILKTLKGRRMVRPEDSLNIDNFTLDSIDGLAPRLERGRLGLQGAKKAQVKFTAHDSLSFLNGEARAANKLQNGHAAANGTGHANDHANGHASDHANGHANGHSDIHGVEKSLVDLVMSEERLPSASLDESSRHRLMSSLHESAEELETPYDTMLRFVNAGRQVALIKIGGDLGIFKSLADSKTPLCSTQLAEGTGADPTLFSRIMRYLVANRLVAEVSPDHYVARKTTHALADPRIESPMRFFHAVSNPAFQALPDFLRETGYQNQTQRQALQKGLGTELGLFPWLKQRPDLLRDFQSLMGVPKEGNCLDVIPLDDSVCSGHKGPVFVDIGGNTGQQAGGLVAKYPALAGRVVVQDRQETVNSATGVKGVQFMAHDFFSPQPVKGAKYYYLRAVLHNWDDDKAAQILANIVPAMSADSLVLIDEVIMPDMGAHVWPAGLDLQMYTLFGASERTAKQWDALLQRAGLQPVSVKKYAPVMGSSVIFAAPK

SEQ ID NO: 31 - protein, 961 aa, Ophiocordyceps australis
MASIPEKCTVLVIGGGPAGSFASSALAREGINVVLLEAEKFPRYHIGESMLPSMRHFLKFIDCYEKWDAHGFNIKNGGAFRLNWSRPETYTDFIAAGGSQGYAWNVVRSEADELLFKHAGECGVKTFDETKVASIEFAPREADAPEKQPFGRPVSATWTRKDGSSGVIAVDYIVDASGRNGLISTRYLKNRAYNQGLKNIANWGYWKGGGVHGVGTFKEGAPYFEALKDASGWVWFIPLHNGTHSVGIVQNQEMATAKKRKMAEPSSKGFYLETLELVPGIKELLAKAELVSEIKSASDWSYSASNYAFPGVRIAGDAGSFIDPFFSSGVHLALSGGLSAATTICAALRGDCDEKFAASWHDKKTAESYTRFLVVVSSALKQIRAQDQPVINDFDEDTFERAFDLFRPIIQGQADSDFKGKLSQAEISKTVEFCFKAFAHVSYEDKEALVKKLKDLGLDGDAHDEKNRQALDELEKKLTPEERSILTTLKGRRMVRPEDSLNIDNFTLDSIDGFAPRLERGRLGLASAEKAKVKYTTHDSLSYLNGEARAANKVPANGAVVKNGCNGANGHHAANGVNGSANKNMAALVADDENLPQTTLDEASRHKLMSSLHESAEQLETPYDTMLRFLNAGRQVALIKLGGDMQIFKSLVDSKTPLSSAQLAKPTAADPRLVARIVRYLAANRLVAQVAPDQFTAQQTTHTLADPRIQGPMRFFHAVSNPAFHALPDFLQETGYQNKSETCAFQRGLKTDLGLFPWLKQHPDLLKDFQSLMGVPKEGNCLNVISLDASVSSEHRGPILVDIGGNTGQQAGNILAKHPELAGRVVVQDREEAVKNASDIKGCQFMAHDFFKPQPIKGAKYYYLRAILHNWDDEKAAQILANIVPAMTADSLVLIDETVIADEGAHVWPAGLDLQMFTLFGATERTTTQWDAILDRAGLRPVAVKRYAPVMGSSVIFAAPK

SEQ ID NO: 32 - protein, 1016 aa, Colletotrichum sublineola
MASVPQSCTVLVVGGGPAGSYASAALAREGIDVVLLEAEKFPRYHIGESMLPSMRHFLKFIDGYEKWDAHGFNVKKGGAFRLNWSRPETYTDFIAAGGPDGYAWNVIRSEADELLFKHAAECGVKTFDATKVTSIEFSSPGEGSEADGKKLGRPVSATWSRKDGSSGTISFDYLVDASGRAGLISTKYLKNRSFNQGLKNIASWAYWKGGGVHGVGTHKEGAPYFEALKDASGWVWFIPLHNGTHSVGIVQNQEMATKKKREMDEPSSLGFYKQSLDLVPGIKELLSKAEMVSEVKSASDWSYSASSYAFPGVRIAGDAGSFIDPFFSSGVHLALSGGLSAAASIAAAIRGDCDEETAASWHDKKTAESYTRFLVVVSSALKQIRSSDQPVLHDFDEESFERAFDLFRPGTFPVARGMKKFNQHSLTLYRPAVIQGQVDADTKGGLTQAEISKTLEFCFKAFAHVSFEEKEALVNKLKELGLDGDAYDETNRQALDELEQKLTPEEQAILKTLKGRRMVRPEDSLNIDNFTLDSIDGLAPRLERGKLGLAPAKKAQVKYTTHDKLSYLNGEAGAANKLESNGHHKPQGNPTVTNGHGATNGHSATNGHSATNGHSATNGHSMTNGHNGVTEHTSYNATHVADLVASGNESGKITLDERTRHSLMSSLHEKAEELETPFDTLTRLVDAGRQVALVKLGSDLGIFKSLAESTTPLSSGQLAEYKEADPLLVSRIVRYLVANRFVGEVAPDRYVSRKATHALADERIASSLRFFHAVSNPSFQALPDYLRETGYRNRTAGSALQKGLAAEQGMFPWLKQHPDVLADFQNLMGIPKESNGWDVIPLDMSLSANHQGPVLVDIGGSTGQQAKLLVAQHPELAGKVVVQDREETIKGAPAIQGVDLMAHDFFKPQPVKGAKYYYLRAILHNWDEDQAVQILANIVPAMSNDSLVLIDEVVISEKGAHVWPAGLDLQMLTLFGASERTGPQWDTLLDRAGLKPVSVRKYAPVMESCVIFASRK

SEQ ID NO: 33 - protein, 584 aa, Pseudogymnoascus sp.
MSVPQKCTVLVVGGGPSGSFAASTLAREGVDVVVLESENFPRYHVGESLLPSMKHFLKFIDLYDQWNAHGFIKKNGAGFKLNHAHGAAYTDFLAAGGPHGHAWNVVRSEADELLFRHAGVSGAKIFEATKVNALQFEPYNGPTMPDVPNPGRPVSATWSSKDGSSGTIAFDYLVDASGRFGLVCNKYLKNRKFNQSLKNIANWGYWKGGGIYGVGTHKEGCPYFEALTDGSGWCWFIPLHDGTHSVGIVQNQEMATAKKREQGSPSTKEFYKTSLDLVPGIKELLSNGELTSEIKAASDWSYTASTYSLPYVRISGDAACFIDPFFSSGVHLGVLGGLSAAVTIMASIKGECDELAAATWHTKKVTESYTRFFLVVSSALKQIRSQTAPVIQDIDEDGFQRAFDLFRPIIQGTADADSGGKLTKADISQTMDFCVKAFTHVSEEQQGALMKKLKAHGLDERLDDEAAKKVIDELEKDLTEEEQQVLNVLRSRRMIHEDSFNLDSFTLDSIDGMAPNLVRGKLGLIKQETAKISKATLYSTTFLEDMTPGTRTHRAEQTINEHQYSGRDTYTNARSSVLASAANR

SEQ ID NO: 34 - protein, 571 aa, Daldinia sp
MNVPQKCTILVIGGGPSGSYTAAALAREGLDVVVLEADTFPRYHVGESMLPSVRPFLKFIDGYDKWIARGFRIKNGGAFKLDHSRPDTYTDFVASGGPEGYAWNVIRSESDELLFNHASSCGAKTFDSTKVNDIQFDPANVAPNFDGQIPGRPVSATWTRKDGSSGIIRFEYLVDASGRHGILSTRYLKNRKFNQGLKNIANWGYWKGGGVYGTGTYKEGSPYFEALTDASGWCWFIPLHDGTHSVGIVQNQEIATAKKREAGCESTKEFYLQSLNLLPGTKELLSKGELISDIRSASDWSYSASSYAFPYARIVGDAGSFIDPFFSSGVHLALNGGLSAAVTISASIRGDCDEETAASWHSKKITDSYTRFLLVVLSATKQIRHQNRPVIHDFDEDSFERAFELFRPVIQGTVDADVIVKPTQEEISKTVEFCFRSLADIPPEHKDALIEKLKSLGVEGEADDESTLRAIEEIEKNLTLEESQILNILRGRRMLRNEDSISLVNFTLDSIDGLAPRLEQGNLGLVKAAPIKASKAQLYSASFLRGGRPDIRTQRGDKVSRELGNDSAVSN

SEQ ID NO: 35 - protein, 577 aa, Hypoxylon sp.
MSIPQNCTILVIGGGPAGSYVAAALAREGLDVVVLEAEQFPRYHIGESMLPSMRHFLKFIDGYDKWNDHGFRVKNGGAFKLDPGLPDTYTDFVASGGPEGYAWNAIRSEADQLLFEHANSCGAKTFDATKVTSIDFEPYVATDATSKFEGPNPGRPISATWKHNDGDSGTISFDYLVDASGRRGILSTQYLKNRKYNEGLKNIANWGYWKDGGVYGPGTYKEGSPYFEALNDASGWCWFIPLHDGTHSVGIVQNQDSATEKKKAGDCPPTKEFYLQSLELAPGIRELLSKGELVSDVKSASDWSYSASSYAFPYARIAGDAGSFIDPFFSSGVHLAFNGGLSAAVTIAAAIRGDCDENTAASWHTKRIAESYTRFLLIILSSTKQIRNQNKPIIHDFDEESFERAFDLFRPIIQGTVDADVKRELTQDEISKAVEFCFRSFADFSSEKKDALIEKLKGLGLEDNEDVEKSATAIEEMQKSLTPDESRILDILRGRRMIRAEDSINLVNFTLDSIDGLVPNLERGKLGLIQATPVKTNNASLYSVKYLRGGRPDIRTQRGDKTSKAPEETTDEGSIPK

SEQ ID NO: 36 - protein, 530 aa, Coprinopsis cinereal
MGRTSPSSLRTQVLVIGGGPAGAYAASVLAREGFQTTVLEATKFPRYHIGESMLPSVTSFFEFIGLDEKLRNHGFCSKPGAAVKFNQRKKEGYTDFLKNNSEGTWNVVRSEFDEMLLRHAGESGATVLEEHKVIEIKFEDVSGKSRPYSAVFTRPSGERSEIHFDYLIDASGRNGIMSTKYLRNRKMNSSLHNIACWGYWEGGYGKYMPGTRRENAPWFEALTDESGWAWYIPLHNGTVSVGVVMDQDVSSSKKAKAREASATGEHTLCDHYLQQLELVPGLKALLGTATLVSNHVKSASDYSYSAERYAGDRFRIIGDASAFIDPLFSSGVHLALLGGLTAASTVAASVRGHCSEEEAAEYHHVKIGAAYTRFFLVVMSAYRQIRSQNVDILSDVDEDNFDRAFDIIRPVIQGTADVGRTLSESELQKTLDFCKDVWAPVDPEMHERVASRYGSELLSPAAPIFKPEDLDQIVDPNDEDAVDVFKRANARKIVDPMFKGISSLESEPVKGFITCLQRGSLGLIYIASAA

SEQ ID NO: 37 - protein, 550 aa, Sistotremastrum niveocremeum
MPVPTNPQNSIPSRTKVLVIGGGPGGSYAACALAREGIDVTVLEASRFPRYHIGESMLPSVRPFMQFIGCEQKIIDHGFTLKPGAAVKFNQWKQEGYTDFVALDPDNAAWNVIRSEFDNIIFEHAAESGANVFQQVKVTSIDFAPDSPPPSPPATLTGPRPVRAHYTRTHSGGATTTGTIEFDYLIDASGRNGMMSTKYLQNRKMNESLKNVACWGYWRGGAMYMPGTTRENAPWFEALTDESGWAWYIPLHNGTVSVGIVMDQSISNAKKAKSKAAAAPKEFTLTDHYHEQLQAFAPHLCKLLTKAHLVTDDGPAVKAASDYSYAATSYAGDHFRLVGDAAATLAFIDPFFSSGVHLAFTGGMSAAASVASSIRGQTTEAEAAGYHDAKVGVSYTRFLLVVMGAYKQIRAQSQPVLADVDENNFDRAFSIIRPVIQGTADAGKRLTENELQKTMDFCKHIFSPTDPEMHEAVGARVDPSLFSPEGPVMTPDDLDRVLDPNDDEARAVLQEVNARKPVHIMYNATGNFDMEDVNGWKVTVKRGNLGLRRA

SEQ ID NO: 38 - protein, 501 aa, Scytonema hofmanni
MSTLPKFTQVLVIGGGPAGSTTATLLAREGFDVTLMEKAVGPRYHIGESLLPSSMEILELTNAKEKVEAYGFQRKEGAYFEWGTDKWSFDFGQLNGKQKYSYHVRRADFDKLLLDHATSQGVKVFEGTEVRELSFNGARPQSAIWSQNSGDNSSGEISFDILVDASGRAGVMATRYLKNRQQNQVFQNIAVWGYWKGAGKVTEAPAGAFVGGSTEDGWLWGIPLHDGTLSVGVVMHKESYKARRSTSLEEFYLGAIAESPLMTKLLTQAELVSSVQAEQDYSYAAENFCGSGYFLIGDAACFLDPLLSTGVHLANLSALLASASITSLLRNEVSENQAISFYEKSYRQAYLRFLSLVSFFYDKKRGTDAYYEEAQELAHNDYRDSAPNTAFVNLVSGMEDLTEAQNGIDNLVIEKISQRAARSLSLEQVQEDLDGEKMDTQIMNVMEGMYTFSKDLSVEAAIDGFYVVTRPRLGLGRVSEKVEESAQKRLADSNAPSPSIR

SEQ ID NO: 39 - protein, 501 aa, Tolyprothrix sp.
MSTLPKFTQVLVIGGGPAGSTTATLLAREGFDVTLMEKAVGPRYHIGESLLPSSMEILELTNAKEKVEAYGFQRKEGAYFEWGTDKWSFDFGQLNGKQKYSYHVRRADFDKLLLDHATSQGVKVFEGTEVRELSFNGARPQSAIWSQNSGDNSSGEISFDILVDASGRAGVMATRYLKNRQQNQVFQNIAVWGYWKGAGKLTEAPAGAFVGGSTEDGWLWGIPLHDGTLSVGVVMHKESYKARRSTSLEEFYLGAIAESPLMTKLLTQAELVSSVQAEQDYSYAAENFCGPGYFLIGDAACFLDPLLSTGVHLANLSALLASASITSLLRNEVSENQAISFYEKSYRQAYLRFLSLVSFFYDKKRGTEAYYEEAQELAHNDYRDSAPNTAFVNLVSGMEDLTEAQNGIDNLVIEKISQRAARSLSLEQVQEDLDGEKMDTQIMNVMEGMYTFSKDLSVEAAIDGFYVVTRPRLGLGRVSEKVEESAQKRLADSNAPSPSIR

SEQ ID NO: 40 - protein, 493 aa, Fischerella sp.
MSTLPKSTQVLVIGGGPAGSTAATLLAREGFDVTLVEKAVGPRYHIGESLLPSSMEVLELIGVKEKVDAYGFQRKDGAYLEWGSESWSFEFTKLNGKQKHSYQVRRADFDKLLLDHASSQGVKVFEGIEVRELSFNGTRPRNAIWSQTSGGNSSGELSFNFVIDASGRAGLMATRYLKNRRQNNVFQNVAVWGYWKGASKLTKGPEGAIGVGSIPEGWLWAIPLHDGTLSVGVVLHREAYKAQRSASLKEFYLNAIAECPLVAELLTQAELVSSVEAEQDFSYTSESLCGPGYFLVGDAACFLDPLLSTGVHLANFSGMLASASIASVLRNEVTEDQALSFYEKSYRQAYLRFLMLVSFLYDQKRGQKAYYQEAQELTHNDYKADAANAAFVNIVSGMEDLTEVQDGIDYQVTKKISQRVAKSISIDDFRKNYDPEVLDPQIMQAMEGTLSFSKDLSVEAAIDGFYIVTQPRLGLSRVQHKAEELLSSELFHS

SEQ ID NO: 41 - protein, 503 aa, Mastigocladopsis repens
MSTLPKSTQVLVVGGGPGGSTAATLLARQGFDVTLVEKEITPRYHIGESLLPSALEIFELLGIRDKVESYGCQQKEGAYFVWGPRQWGIEFQRLLNKYTFQVRRGRFDKLLLEHASEQGVKVFDGIEIRKLSFDGERPISATWSSGGMNGSSGEIAFDFLIDASGRSGLMSTQYLQNRRYHKEFQNIAIWGYWKNVDFSKIWPENGTVSARTEDGSGWIWAIPLSDDTLSTGLVLNKEIYKQRKSQASLEGIYAAGIADCPYVSDLVKTAELASPIKVEQDYSYVADKFAGPGYFMLGDAACFLDPLLSTGVHLAFFGGMLSAASIGSVLRNEVTQEQAYSFYDKTLRFHYLTLLVFVSSFYHITGNPEDMDMDADPSAGPRRFIAEVEDLQKVEPQMRQLVSEHMVELLTKAEEGVRLMVAEELEGTAKLSGELDPKHQAVFLQLWRGVFGYLPDFDGLRLKTQTNLRLVSVSEDDAAALTLDTVLDEKYYAQQEADMALTK

SEQ ID NO: 42 - protein, 462 aa, Moorea producens
MTLNNSDTFKMFDAIVIGGGPAGATCAYKIAANGHSVLLLEKAKFPRFHIGESMVPYLYKLFEMIDISDKIKEGGFVQKNGVEFLTGTTGDLRRQNFGNVAKGQTPFSYNLNRARFDKILLDHAQDTGAQVLQEADVKKLIFDGERLAGVEYQYQGCRHEARANFVVDASGRAGLIAKHFNLRKMNNKLQNVAVFQHYKDVVAENNPGVEGDVLFSCHEDGWLWGIPIETNVMSVGAVMPLSILKQSNPEEIFKAHCDRSPRIKSAIKGATPLFNKPKVELDFCYYSEQFTGPGYFIVGDAACFVDPVFSGGVFLSMLCGLKAAEAIHEIFDGKDDLEACQDFENLCKTGYDSYFRVVYSYYYEFNRDMNKMGLNLPGGFRFVLQTFAGDFWAERDQPVLSYLRSKKEWDTFEQPFERIYDCPIYPDTHYKAADPASFTPPEDFLESINTQTQTETQKAAVL

SEQ ID NO: 43 - protein, 462 aa, Calothrix sp
MNIPQQCDVVIIGGGPAGSTAATILARKGYKVVLLEREKFPRERVGESMLPFCYELFRELGVLAQMEKRFVRKPGVRFINSDGSASTYWCFNHVIKDESYLSFQVNRSEFDTILLENSRKHGAEVREETRVDVCSLEVEGSTDKVEVQAISRNGERLSLQTRFVIDASGRSGFIASSKGWRKGHKGFARTALWTHWKGIKSLKGGLEEGSSIILYLGGEKRGWAWVFPLGIDWVTVGVVMDTAYLNHKRQELQASSIKDWCTELYQQELYSSEFIRELLAQARISMPVQVEGDYSYYSENKFSTKYAMVGDANRFLDPIFSSGVFLSMKSSFLVANAVDKMLLSNQANDMSYLEEAYAKINGAYDFVYRLISLFYQPHALSWAEAGATFNSVSQIDYKRHEVAMGAGHYMLAGDFFENHEKYHKFLDMMENPRFFEGYKNLVVDREEYQTESCGAERSIIFP

SEQ ID NO: 44 - protein, 466 aa, Fischerella thermalis
MNHSYYDVVVIGGGPAGSTLATLLVRKKYQVLVLEREKFPRFHVGESLLPATQLIWEKLGIAEPLQHLGNTFKYGTEIRMGLNPQQSEYEYSRQEFYKFPTQRLQQQPYAYQVERSEFDLFLLNHAREEGATVFEEAVVKEVLWEDDTATGIHWKSKDNIEYTTKAKFIADCSGRYGLITKSRKFLIPNKTIKTSAVFGHFKHVTRASGIQQGYFNGYVIENGWIWFIPLASDIMSVGVVMNEPGTSWWKQKSPEEILLTYIQQYKFIRERFEQAEQFSKVRMLRDLSYASKRSVGDGWILVGDANFFVDPLFSSGVHIAFRSAEKAADAIDEFLKNNRDRKSLQQYEKWSQKEHFHVSTTMALMYKMLKYRISMQLLIKLTGKYSNHWDNLLLRRLVAWGSGYYEEFHWTLYCSWLFCFLLIGIGKVCEKFLGISGWSTQPEFCSKSPLTFPKSVESLKNKHPEI

SEQ ID NO: 45 - protein, 468 aa, Nostocales cyanobacterium
MKDKKQYDVIIIGGGPAGTTCATMLSREGHEVLLLEKYKFPRFHIGESITAFGANAFKKLGIYGELKQIGYVKKKGAEFIFQEKSYSAYFNKSFQNESDELPWAFQMARSKLDLLLLENARKSGATILEQHVVKRVLFNGERAIGIEYKDLSKDAINPPLQYAYAKWIVDASGQAGMINKQVENNCYNDFLLNKKLAIFNHWEGDFEITNTDEDVNFKFCIHENRRDWAWYIPIDKNIVSIGVVLSEESIKNRTEGLEGVFYKYAEQLPFISDFLKNPTLKPIDKFRSARDYSYRCKQYYGDGWVLVGDSAGFIDPIFSTGLQIAFSSAFMLVDALHEVLSQKSPNYSKLKAYNRNVNKLYKINSMFVYLYYLSGLEFEKLWSISHMWKYLKWSGLKYPVLFFWYALQIRIASKKQARIWGDEVLFGIIKSQNPLANLLLALSENYERLQNRRAKNVISRNQFLEMEV

SEQ ID NO: 46 - protein, 437 aa, Nostoc sp.
MNIPQQCDVVIIGGGPAGSTSATFLSQKGYDVVLLERHKHPRHHIGENTIPQFWKYTDLAQVSDKIAAEGFIQKAGGTTFWNGRIRQVDFKDFGYSRQALHVERDRFDLILLENAREKGVQIFEEVSVLSVDLQDGQQEQSLTYRLLKDKSLGKITCRFIVDASGQNAVIAKQMGIRTIDKDFRFMSLWGYFKNSKYIGLNGKAHSVENLRTILPTTFICSFAETGNWGWSWHIPLRESTSVGLILPLEFMKTVQLNGGSWESYFRQKCCEIPILEDLLANAQFCEGSFAKIQDYSYRSTQLAGPGFFLIGDAAGFIDPIFSIGIVLGMYSAYTATWAIDRSFKNPSSLVHNQALFSSQLQGRLEVARSLALPHYQSGDRACDLAKTTIQMERALEQELMATWSTMTTRPENFQAIASSLKGREINSNKFRVIEEMI

SEQ ID NO: 47 - protein, 432 aa, Cyanothece sp
MNYEIAIIGGGPAGASLATYLARAGKSVAIFEKSDFPRFHIGESLLPATMPILQDLGVYERMRSTFLNKPGGCWYYDDTPVMSDFAKCRETASFKDFRHAFMVERGEFDRILLDNARDHGVRVFQHHLVREAIWEGERMTGLQVKDLQTMEGKSIRTEMVFDCSGYRSVIASQRNLRKPNRLKKMAIFAHYRAEALEERLKQGWFVGQMFYDGWLWLIPIDKDRISIGVVTTLDNYKKASISPEQFLDHYIRTLSLTRKGLGKNIERVSDIYLYGNLGYSSERIFGDRWALVGDAAVFIDPCYSSGVHLAMDSAREIARVYLEHGYDARSLQNALSKYEKRLRQHEELVLMLVDSFYMASRNKFLRFLVKNLSKISSLNQKFVHFTGGDLADDPGYIKMTYYTHLAISALANVFQRQPSAAPEKGKSAVLIK

SEQ ID NO: 48 - protein, 340 aa, Planktothrix agardhii
MNIPQRCDVVIIGGGPAGSMAATFLSQKGYDVVLLERCKYPRHHIGENIIPQFWKYTDLAQVSDKIAAEGFIQKAGGTSFWNGLIRQIDFKDFGYSRQALHVERDRFDLILLENAQNKGVQVFEEVSVLSVDLQDGQQEPSLTYRLLKDKSSSKIACRFIVDASGQNAVIAKQLGIRTIDADFRFMSLWGYFKNSKYIGLDGKAHSVENLRTILPTTFICSFAETGNWGWSWHIPLRESTSVGLVLPLEFMKKVQLNGGSWESYFRQKCYEIPILEDLLANAQFCEGSFAKIQDYSYRSTQLAGPGFFLIGDAAGFIDPIFSLGIVLGIELLQNNFMVLW

SEQ ID NO: 49 - protein, 517 aa, Trichoderma gamsii
MAIPEKCTVLVVGGGPAGSYAASALAREGIDTVILEADKFPRYHIGESMLASMRHFLRFIDVDSEFDNYGFTKKVGAAFKLNPRKREGYTDFLAAGGPENYAWNVVRSEADHLLFKHAAKSGAKAFDGVQIKKINFVDAPYKGSGELPHEYPGRPVSASYLRKDDNTTHEIKFDYIVDASGRVGLLSTKHLKNRRYNQGLKNVANWGYWKGAGAYGKGTPRENSPFFEALQDESGWAWLIPLHNGTVSVGVVMNQKMSAERKSQMGSPDSKTFYLNCLKELAPDLSNLMENGELITDIKSASDYSYSASGYAIPYARIAGDAGCFIDPYFSSGVHLAFVGGLSAATTIAASIRGDCSEEDAADWHSKKVADSYVRFLLVVLSAYRQIRAQNEPVLSDFDEDNFDRAFAFFRPVIQGTADVDSKLSQAELSKTLEFCSNAFEPVKPEDRSSMLEKLGQNPDTAYQVDLSPQQRTVVDHIRARQMMRTEDTMNINSFGTDAINGFIPNLKKGGLGLVRA

SEQ ID NO: 50 - protein, 528 aa, Halobellus rufus
MAGSTISMILAKNDLDVLLIEAKKHPRFAIGEAMLPLSAVWMWIVGEYFDVPEIQHLSDANRIVDNVTESCGVKHSVGFAYHERGQPFSGEHAHQLVPPEMPFYKESHLLREHVDHYLVESAGSYGVEYVDETPITDVEIDDDEVTVTTDRGTTTGAVFVDATGGNSILAEKRGYRDETPDLETDTRAIFAHVEGLEPFDELIDEEDRPGQTNRLHDGTLHHVFEGGWLWVIPFDNFDRSTETKASVGLMLDRNTRPRDESLSAEEEFHEIISAYPDVERHLGPVEPVMPWIRTGRLQRSASESSGHRHLLTNHTYGFVDPLYSQGMVHTFESVFQSAKLLLEAFEVGDFSAERFAPIDDLHRRQLETADLLVSNAYTSMDEFDLWNAWTQLILVESVFPDLYIQRHCLKYLSSGDPAELDRLLRETRPGDDAPFAPEKDALLDRSSAVLDAYTAGEISAGTAAESLFDAMKRADWLPRSVYDWGNEDERHIDFADPAVTGELLAWGRTDAPAHIREGLFDFEMPEMP

SEQ ID NO: 51 - protein, 491 aa, Diploscapter pachys
MTPPPSSIAILGGGTAGWMAACLMAKAWPQARITVIESPDIGIVGVGEGSTPQLKALFDALGLAEADWMPAADATYKAGIAFHGWSDDTPAYFHPFAGQIDLHTQGAFFASTRARRHGADVPAHPDRFFLNARLAEAGRAPIAPAHFPFRIGYGYHFDAHKVGHVLRDAAVARGVVHLPRRVHDVVVDTAGQVVALTLDEGDALHAELFVDASGFASAIAQQALGVPFRSFANTLFADRAVVMPTPRQAALPVQTKATALSAGWAWGIPLTSRTGNGYVYASRYLSSDAAETELRRHLGLLDADVAARHLSMKVGRVETSWTANCLAIGLAQGFIEPLEATALHIVQATIEGFIGAYQAGSRDAFNAAIARRYDGIRDYIVAHYRLNRRSGPFWRDVAANDDLSDDLKAIMTAWFTGGDVAAVVEGRGLAGYYAPMSWEVLLAGYGTFPDATRLRTAPPVADLAAIDTLLSGCLLNFPDHQAALDGHRRMP

SEQ ID NO: 52 - protein, 364 aa, Ricinus communis
FAPRDHNAAPGSPLADIAYAYHFDATLYARYLRELAERRGVQRIEGKIVGVQQRADDGHIASVTLESGQVVDGELFIDCSGFRGLLIEQTLKTGYVEWSHWLPCDSALAVPSASVDPVTPYTRASAQRAGWQWRIPLQHRTGNGYVYSSKYISDDEAAATLLANLDSEALAEPRQLRFTTGMRRKFWHKNVVALGLASGFLEPLESTSIYLAQSGITRLLSMFPQRDVHPLLVERYNQESAFEYERVRDFLILHYHATERNDTPFWDYCRTMAIPDSLREAIDLFRSDGRYFRNGDDFFALPSWVQVMLGQGIVPRGYHPIVDEMPESVLIEQVGGMERMLADAVAAMPTHQEWINRYWKAPAL

SEQ ID NO: 53 - protein, 535 aa, Fomitiporia mediterranea
MPSEIPGTCTVLVIGGGPAGAFAAAALAREGIDVILLEADNFPRYHIGESMLPAMRHMFRFIDVDSAFDSFGFIIKNGAAFKLNQHNREGYTDFVAAGGPNNYSWNVLRSESDNILFRHAAASGAKVFDGVKVTELSFKPDDASHLGRPIRASYVFKSNRETGDIAFDYIVDATGRAGLMCTKYLKNRTYNQSLKNIAMWAYWKGTGVYGIGTPREGAPLAEALIDESGWAWFIPLHIGTSVGIVMDQELTNKKKRAHDPPLSGLEFYLEQLRLAPTIMSLLGSANPTNIDDEQMVRSASDYSYSSSCYSGPGFRIAGDAGAFIDPFFSSGVHLALIGGLTAALTICASIRGDCTESEAADWHSKKIGSSFTWFLMVVLGAYKQMKSQRDAVLTDINEDNFDRAFSFIRPIIQGSIDVDEQLSVSDLSKVIDICVRAFEPAQTESREAVLAKLKDECFATQVYENSQYLCIGNVGENVLSDDEKRVLAYINAREVLGARDRALTMNAFVTDVIGGRRPRLKQGELGLEIATNRMS

SEQ ID NO: 54 - protein, 559 aa, Dyella thiooxydans
MAQRPEFPAGLRPFFAIGQVSEDDGTAAGEEPAMARINKVLVVGGGTAGWLVACYLARAMRSSDPSGIQVHLVEAENIGLLGVGEATFPSIRGTLAAIGLDERHFLDGAHATYKQGIHYRHWVRPPGTPGRDAFFHPFNQPSQRPGGPELLPYWLLGEAPAELPFAEAVTLQSRVVEGGRAPKRPQDPDYQGPLNHAFHFDAACFARVLAEHGTQTLGVHRHVATVERAELDERGAIARLITTELGPMTADLYVDCTGLRSHLAGGTMQSPFLSRADVLFADRAMAMQVPYDRPDAPIPSYTIATAHEAGWTWDIGLQQRRGVGYVYSSRHTDDARAEQVLRGYLGNAAEGLTPLRIRFETGYRPEHWRHNCVAVGLAGGFVEPLESTGIALVELGAYLLTHALPADLDDLPRIARHYNTMMVARYERIIDFIKLHYCLSQRRDTPFWRDNTAPGSIPQTLQDKLALWRYRPPHRLDFVGDLEMFLVASWQYVLYGMEFRTDLTPMRRSYTQVAEARQEFATIQQVAARAQDDLPDHRAFVERMVREHRERAGRAHAAA

SEQ ID NO: 55 - protein, 502 aa, Sphingomonas parapaucimobilis
MTNDVVRVVIVGGGTAGWMAGAALTRLLSGQCSVRLIESEAIGVVGVGEATLPHIRSFNERLGIPEAEFMARTRATFKLGIEFRDWSRIGDSYIHPFGTFGRGTGAIDFHHYWSRLVREGRDLPPLDQLSYACTLAREARFEHPDQGRGGLSSTFGYAYQFDALLFAPYLRSLAEEAGAIRTEGLVVDVERDSQNGLIRAVVLDSGERVEGDLFIDCSGFRSLLLGQTLDEPFEDWSKWLPTDRAVAMPCRTETAVTPYTSAIAMPAGWRWRIPLQHRTGNGYVYASDFVSDADAAHALEKAVEGEKLAEPRLLRFKAGRRRRSWVGNCVAIGLASGFLEPLESTSIYLVQQAITALIELFPGRRMEASDRDEFNRVIDLEYDRIRDFLILHYHATSRDDSPFWNYVRTMPIPDSLGEKLELWRRRGRVVKYREGVFLDASWIAVYLGQGIVPEGWDPRADVAGTGDLVQAVAALRSEIAAEVAIRPDHRAFLERYCPMVAA

SEQ ID NO: 56 - protein, 1007 aa, Aspergillus arachidicola
MTNVPEKCQVLVIGGGPAGSYSASALAREGIDVVLLEAEKFPRYHIGESMLPSMRHFLKFIDAYDKWDAHGFNVKNGGAFRLNWSRPETYTDFISAGGPGGYAWNVIRSEADELLFKHAAECGVKTFDETKVASIEFAPSEDANPLGRPVSATWNRKDGTSGTVAMDYIVDASGRNGLISTKYLKNRTFNKGLRNVASWGYWKGGGVHGVGTHKEGAPYFEALKDASGWVWFIPLHNGTHSVGVVQNQEMATEKKRKMAEPSSKGFYLESLEFVPGIKELLSNAELISEVKSASDWSYSASSYAFPGVRIAGDAGSFIDPFFSSGVHLALSGGLSAATTIAAAIRGDCDETVAASWHDKKTSESYTRFLLVVSSALKQIRSQDEPVISDFDEQSFERAFDLFRPIIQGQADADAKGKLTQAEMSKTVEFCFRAFAHVSFEEKEALVKKLKSLGHDGDAYDEANRKALDELEKHLTPEEQAILKTLKGRRMVRPEDSLNIDNFTLDSIDGLAPRLEKGNLGLSPAKKAEVKFTTHDALSFLNGEARAAKKTLSDGQSQTNGNHMCKDHDQTNGHTETNGHIESNGNAATNGHTEANGQSHANGHTNGNHMTNGHDEVNGHNNVEVRTVKSCMADLIAAEKSSFQTPVEEATRHRLISSLHQSAEDLETPFDTVVRLVDAGRQTAMVCIGGDLGIFKSLVESKRPLSSEELAKATMADPLLVSRIMRYMVASRLVGETGPDQYVASKKTYVFADPRIEHPIRFFHAFSNPAFHALPEFLKETGYQNEPKGSAFQKALSTDLEPYPWLKQHPEVLKNFQAAMRLTRDANGVDMMPLDESVSSGHDGAMFVDIGGNTGHQAAEVLSKYPELAGRVVVQDRGEVIKCAPDIKGIQWMEHDFFQTQPVKGAKYYYLRAILHNWDDKNTVQILSNIVPAMSADSLVAIDEVVVPEENAHVWPAGLDLQMYSLFSTTERTASQWDTILDKAGLRAVAVKKYAPVMQSSVIFAAAK

SEQ ID NO: 57 - protein, 497 aa, Albimonas pacifica
MTAMSGGPDPLRVLVAGGGSAGWMAAATLDAALNRGGARAVAITVVESPDTPRIGVGEATIPTIRRTLRRLRIPEAEFLAAAEATFKQAIVFADWSGPGSGFAHPFHTRPGDGAEQAAARFLRSDGRTPFADLVTPQPALAAAFRGPRRAGDADYVGPLPYAYHMDAEAFAELLAARAVTRGVARVSAHLRPPERAPDRPLEAVEATDGRRFAADLFVDATGFRRLLIGQGGFLDQSRHLICDAAVALRAPCAPGPTRPFTVAAAREGGWTWDIPLRTRRGRGYVHATAHLAPEAAEDALRAETPGAGEARRLRFQVGRLAQPWQANVVAVGLAAGFVEPLESTGLHLADLAAGLLAENAPLAGPNPGLARAYNALLAAAHDEVVDFVNLHYAASPRRDTPFWRDAADPARRTDRVAHLLELWEARPPVAADFPSSLQAFNHRNWEFILHGLGWRPRALGPAGGPPLAPDPELAAEARRLAAELPGHDALLAALAPR

SEQ ID NO: 58 - protein, 503 aa, Cylindrospermum stagnale
MHVEKTIHNVVVLGGGSAGFLSALALKVKMPSLNVVVVHSKTIPVIGVGEATTAWIPWFLHTYLGLNRQQFYEETQPIWKLGIKFIWGNSHQSHFNYPFVTHLADKLSVLDKSTAYYCLDSTRESSIYSLLMEQYKSPCFRKENGDFVFDERFGYHIENASFVSYLERRAAELDIKIIDQPVVNIQVAENGYIHQLKLDDGTTLAGDLFVDCSGFRSTLLGEILQEPFCSFSSSLFNDSAVTGTWMRDDVIYPFTTAETMQAGWCWRIDLPEQVNRGYVYSSAFISDDDALAEMKRQNPLMGDDHHSVVRFKSGRHQRFWVNNVVGVGNASGFVEPLESTGLHMIGETIKCVCDVLIDSDQQPTPGLINLANQAIAEKWDDIRDFLSIHFKFNRRVTSDFWQHCWQQTDIGEAEAVVDFFQNNGPSPIGQLLLRKNSVFKYNGYLNLLMGQQVATKYQGNNEILDLDNWRQVKNYFLKNCDNALPIHEAIQVVKERKCQWLSS

SEQ ID NO: 59 - protein, 582 aa, Actinocynnema sp.
MDHKELAAGMGAGHRTELHAVLESLGESEAAAVRSWLGGGETPDPLALLGELAPVPSDLSRPDDADPQAIRRIGVIGGGTAGYLTALALKAKRPWLDVTLVESRQIPIIGVGEATVSYLTLFLHHYLDIDAEELYRCVQPTWKLGIRFDWGPHPDGFMGPFDWSADSVGLLGALAATGNINGSTLGSAMMVADRTAVFDVDGRPVSLMKYLPFAYHLDNGRFVSFLTDLARRRGVHHVEATLADVVVSGAEWVDHVRTDDGRELRFDMYVDCTGFRSRLLGQALGTPFTSFASSLFTDSAVTGNIDHGGHLRPYTQATTMNAGWCWRIPTRESDHRGYVYSSAAISDQEAADEFARRYPGVDGLRQVRFRSGRHEKSWRGNVMGIGNAYGFVEPLESTGLLMIAVAVHSLVSTLPGSWSEPSPRELVNAGLGQQWNAIRWLLAIHYRFNTRLDTPFWKEVRATADVSGFDTLLEVYAGGAPLSQRHVLVQDVLNRIAPTFFGLFGIDYLLLGQQVPTRRMPLAEPIERWHARKHAADALVAAALPHREALDAFDAHPELNKQLLEDTDSWAGRSIAKRVGLL

SEQ ID NO: 60 - protein, 1069 aa, Trichophyton violaceuym
MVGLVAIISVWWCVRPKPNKIPIIGDAKNQNFMAALEEGSRKQYPESCFRIPTRDIPTIIVPRKCLSTIAYAPEHRLSLGREVYERLMGRYTKMVKSDHLAEFVRGGLSKQLGANISLLQEDAIWTISSQIGNCPEWKPLQLFPAMVKLVPLHIGRTFINSPLSREQEWIDLTLEYAISTVTIAAKMSNTHWMLRPFKALFLPEIGEMSQQFKQASKLLSPVLNARLLGDAPGTKDLMQWMIDNYPGQSNNLTLHTRLQLEAVQAATYNLAFQLIHFFFDILAHPEYIEPLRIEIQTVFDSCGRTWTPAALAELRKCDSFLKESQRLNPIGIVSVSRFALSKFDLPDGTTVPAGISVSAPAMTVNTDPSLWECPTQFDGYRFEKLRQIKGNEYKYQFSSISASELNWGYGTHSCPGRHFASNQVKVIIAELLMKYDFRFEENIQDNQTPKRPANNFDGVRIMPNPEARIMIRSREVGAICSVPEERDRGKGDRIYRASNHSRVNGTNKSFNFTEEANMSIPASCTALVVGGGPAGSYAASALVREGVDVVLLEADVFPRYHIGESMLPSIRHFLRFIDLDSKFDSYGFVQKNGAAFKLNSKPEAYTDFVAAGGPGSYAWNVIRSEADHLIFKHAGENGAKTFDGVKVNAINFEPLSEENSDPVSTDLGRPVSATWTRKADKSSGVIKFEYLVDATGRAGLVSTKYMKNRTYNQGLKNVATWGYWKGASSYGIGTPREGDPYFEAIADGSGWVWLIPLHDGTTSIGVVMNQAMATTKKREAGSSSQQFYLDNVKQIPGIWQLLDNAELVSDLKSASDWSYSASSYASPYLRIAGDAGCFIDPFFSSGVHLAFASGLSAALSIRAAQRGDCDEMAAAEWHSKKVAEGYTRFLLVVMSALKQISDRDEPVLTDWDEESFNRAFDLFRPIIQGTVDVDKTLTQAEIAQTINFCVNAFQNAGREEQDALMNKIKSVSETKNGEETDVVKKLKESLSADERRTLNTIQARQIIRSEDTMNIDNFTVDVIDGMVPNLKRGSLGLLRYVPKVKAGQQEDELRAKLGLPEKQESIFSY

SEQ ID NO: 61 - protein, 577 aa, Piloderma croceum
MSRSAVPKKAQILVLGGGPAGSYTACMLALEGFDVVLLEAAKFPRYHIGESMLPSCPQFLKLIDLEETVENFGFCNKPGAALKLVGEKKEAYTDFIRTHPENRSWNVTRADFDEILLRHAEKVGVKVFEETRAFSIKFVNDNPKGRPLAVKWQNIIDRNVSGTVSFEYLVDATGRDGIMAQKYLKHRKVNTSLRNVACWGYWKGAGVYGVGTSRENAPWFEAHTEESGWNWFIPLHNGMTSVGVVINEDAGNQRKLAAKRANGGVASTLKRHYLDCLQLSPGLIDLLGDAKLLEDGPYPVVQSASDFSYNAPTYSGDHYRLIGDAAAFIDPFFSSGVHLALTGGLAAAVSIASSIRGEYSETEGCKYHDAKIGVAYTRFLVVVLSAYKQMRAQNRSVLSDFDEDNFDRAFDIIRPVIQGDADVGRRMSEDELQKLIALCGSALLPVDPEVYARVVSRLDTKLVDPRGAIVTPEEIDLLVPNDLEARLVLKEINARKSTGGLFLTISDSFEEVTAGFSARVHRGNIGLISHAPKANSTSGFSIQVGKARPSHLPHLLLLFFGVVLALLFHQYGTFGVV

SEQ ID NO: 62 - protein, 716 aa, Cellulophaga sp.
MTIHFIEYEESKICQSIIKQLQEKYNFSCCLTKDLGCVKNNDLIIWFVQNENLESVLNTCANIRKHLPDTTILFVSAFECDKILIGPIYSPNNTSGLDSALFFLYQEKCEDINSKLKLKLPLFKDILGEEFYIKRIHKLTQKLAEKINEFKNVSQNKNSINKIEIYNIKESNFDERFVYPILEIKEDFYEKKKNSQLIQDINFINASKKDFRFKLLNKSTLNKTVAIVGGGTAGYLSAISLKTKHPELEVTLIESEKIPIIGVGEATTPDLVDFLFKDLKLDKLDFYKKVEPTWKLGIKFYWGESGDYTFNYPFGEHDLVSGYINGNIDHGSLTSILMSQDSSFILRKNEKDFYSLTNPRRIGYAFHLENRKFVTYLKNKAIELGVVRLQNTIDKVILNDSHNQVSSLITSDGKKLQCDYYLDCSGFKSLLIDKLDSQYFSYNDNLITDTAISFNVNHKGEIKPYTYAESMKNGWCWNIPLRDSDHRGYVYSSKLSSENDIIDELKLKYPNLTDYKVIRFKSGRHNSFIKGNVAAIGNSYGFVEPLESTGIHMITEHIKILTKSFDALINDRTGTLKGHLNRHIANKWDYLKWFLSIHYKYNKKFDSPFWEFCRNEIDVSKYQHILDLYKSDGPLQMLNNSLSDSLRFDFVDSLFGLKGVDNILLGQGVIPNSIDDIQNVGHELWKYNVNTWMNLSKRTIPLKEDIEILVQNPNLI

SEQ ID NO: 63 - protein, 545 aa, Hydnomerulius pinastri
MSATIPTHTQVLVIGGGPAGSYAASALASEGLQVVILEGAEFPRYHIGESLIPSVRHYLRYIGAEQKLADHGFKHKPGAAIKFNQFKREGYTDFVALGHSNNSWNVTRSDFDKMLLDHARESGAWVHEKTKVQSVRFSSSEPSRPVAAEWSQSSGTGQEGVISFDFLVDATGRTGLMSNKYLENRHYNESLRNIALWGYWKGVGTYGGGTTREGAPWFEALTDDSGWAWSIPLHDGTTSIGVVMNQKLYNERTKALPGSSTATRYQSFLSLAPHVFNLIGDGVLVAKPSVDGPPGSLDPLVRSASDFSYSAPEYGGNSFRIIGDAGAFIDPLFSSGVHLAMTSALSAAASICASVRGDCSEDVASAWHSRRFSLSYTRFQMVVLSAYKQIWATNLDVLNDVDEDDYDRAFASIRPVIQGASDMGTRLSEGELQNALEFCSKFFNPTSQERRGYYTLKHGLPKELFDITAPLVDPKNMDAALRSAGINLSEDGGSAQEDEVKLVMEQVNARRVLHREYAVNNLEAEEINGYAVRLERGSLGLVKVV

SEQ ID NO: 64 - protein, 552 aa, Trichophyton soudanense
MSIPASCTALVVGGGPAGSYAASALVREGVDVVLLEADVFPRYHIGESMLPSIRHFLRFIDLDSKFDSYGFVQKNGAAFKLNSKPEAYTDFIAAGGPGSYAWNVIRSEADHLIFKHAGENGAKTLDGVKVNAINFEPLSEENSDPVSTDLGRPVSATWTRKADKSSGVIKFEYLVDATGRAGLVSTKYMKNRTYNQGLKNVAIWGYWKGASSYGIGTPREGDPYFEAIADGSGWVWLIPLHDGTTSIGVVMNQAMATTKKREAGSSSQQFYLDNVKQIPGIWQLLDNAELVSDLKSASDWSYSASSYASPYLRIAGDAGCFIDPFFSSGVHLAFASGLSAALSIRAAQRGDCDEMAAAEWHSKKVAEGYTRFLLVVMSALKQISDRDEPVLTDWDEESFNRAFDLFRPIIQGTVDVDKTLTQAEIAQTINFCVNAFQNAGREEQDALMNKIKSVSETKNGEETDVVKKLKESLSADERRTLNTIQARQIIRSEDTMNIDNFTVDVIDGMVPNLKRGSLGLLRYVPKVKAGQQEDELRAKLGLPEKQESIFSY

SEQ ID NO: 65 - protein, 529 aa, Talaromyces cellulolyticus
MSIPTKTTVLVIGGGPGGSYTASALAREGIDTVLLEADVFPRYHVGESMVASIRHFLRFIDLDTTFNNHGFIKKTGAAFKLNNQKTAYTDFIVAAGPDSYAWNVIRSEADDLIFRHAGKSGAKIFDGVKVTSLEFVPNKEADLPTDGTADPGRPVSATWTAKDGRTGSISFDYLVDASGRVGIVTTKYLKTRSYNQDLKNVASWGYWRGAISYGVGTPKEGQPFFEALQDGSGWVWFIPLHDGTVSVGVVMNQEMSTQKKKESTTDNGRDFYIESIKDAHGVTHLLQNAKLDTEVKHASDWSYSASEYASPYVRVVGDAGCFIDPYFSSGVHLAFSGALSAAVSISASIRGHCDETQAWKWHSTGVRDRFTRFLLVVMSATKQIRARDAPIMNNQGEDGFDDAFTIIRPVIQGISDVTGKTTHDEVSRAVDFTTEAVAKTKPDDSANSSSQAGPQFTDTIQQGSLTKDEAKVLHMVKNVFKDFFVADVYNGYRAKLERGSLGLEKVNTEALLVGEKLSGTKTEVKEVEV

SEQ ID NO: 66 - protein, 556 aa, Moniliophthora roreri
MPTGCSNSSPPRSIDILVIGEKLTIPQLSPGGPAGSYAASVLAQEGLNVALCEASKFPRYHIGESLLPSVRNFLRFVGAEGKVAKHGFTRKPGGAIKFNHQKREAYTDFVAIGQENSSWNVVRSEFDELLLNHARSCGVSVFEQTKITSLTFAQEDPSRPVSASWISSESSGEHDGAPGERSGTICFKYLIDASGRAGIMSTKYLKNRHFNQSLKNIAVWGYWTGVSSYGLGTPRAGAPYFEALNDESGWAWFIPINNGTTSVGIVRNQQMHVEQLRCPVSGEIPFDGSAVPNPSQSRMVDQYAFNLSLAPGVVKLITEHGKLEEGSVKSATDFSYSASVYGGNGYRIVGDAGAFIDPFFSSGVHLALTSALSAATSICASIRGDCSEEEAAVWHTRRFSTSYTRFQIVVLSAYKQLRSQQLNILSDIDEDNFDRAFNFLRPVIQGNGDMGVRLHGRELEDCLDFCVKLFNPTDPEEHDRLRNDKNFDKALLDLSAPISNLSAITPGSAEAKEILEKVNSRKVLNAEYTTDSFVSESLGGYSVRFEKGALGLKKGA

SEQ ID NO: 67 - protein, 500 aa, Nostoc calcicola
MEKTIHNVVVFGGGSAGFLSALALKVKMPALNVVVVHSTTIPIIGVGEATTAWIPWFLHKYLELNREQFYEETQPIWKLGIKFIWGDSSQSHFNYPFVTHLADKLSVLSKSTAYYCLDSTTESSLYSLLMEQCKSPCFRRENGDFVVDERFGYHIENVSFVSYLERRATEIDIKIIDRPVVNIEVAENGYIRQLKFDDGTMLAGDLFVDCSGFRSALLGEILQEPFCSFASSLFCDSAVTGTWMRDDAINPFTTAQTMQSGWCWQIDLPDKVNRGYVYSSAFINDDDALQEMKRHNPLMSDRHSIVRFKSGRHQRFWVNNVVAVGNASGFVEPLESTGLHMIGETIKCVCDVLIDSDQQPTPALINLANRAIAQKWDDIRDFLSIHFKFNHRVESEFWQHCWHQTDIGDAEAIVDFFQSNGPSSLGQILLRPNSVFGYNGYLNLLMGQQVATKYQSHNDILDLDRWRQIQNYFTKQCANALSIHEAIQVVKERKCQWLTS

SEQ ID NO: 68 - protein, 514 aa, Massilia sp.
MSYQSIAIVGGGTAGWLAACYLQRALNGNPAHPVRITLIESPDVAAIGVGEATVPTLRMMLRTIGIPEAALFASAEATLKNGIRFVGWHDGTDSFDHPFDMPIVADGYSTMTHWLNLKQRGLTRQPFGEAGVVQPALMDALRSPKLMSSAPYEAPVPYAYHLDAVLLARLLRDTAKERGVVHVEGTVEQVDVDETGIRAVCLADGTRHAADLFVDCTGFASLLLGKTLDVPFHSYADTLLCDRALACPVAHEASDAPLRSHTVATAQDAGWTWDIELQTRKGTGYVYSSRHCSDDEALATLRRYNAGRTELAEPRLLRMRVGRHTRMWEKNCLALGLAGGFIEPLESTGIYLIEYALQMWLDYLPTPAGAAPMRDRYNMLMAEHYDELHDFVLAHYVLSARRDTAFWRACTEEVKVSDRLAALLALWKHKLPGTADIDARRQVLFGPHNWFFILAGQRCLPEHGIGQMPYIAPERSQAALARIAEIRKAAVSQSPSMREYAQKIRAAAANAPRR

SEQ ID NO: 69 - protein, 500 aa, Candidatus Thiomargarita nelsonii
MNSINNIVIVGGGTAGWTTAACLARVLKNTDTKITLIDSPEVATIGVGEATIPPLVEFIRFLGINEQEFVTKTQATFKLAIKFTDWNNLGEHYWHQFGSVGADIDGKPFYQHWFKSTLNGNENAYTDYSPAIAMAKENKFVVPPTQQQQQSILNGASYAWHFDALLVANFLTEFSTNLGVKHLKGHVECIEKHENGFIKNLILKDGRNINGDFFIDCTGQKALLIEGAMGSEFENWQKYLPMNRTIALQTENHGPLVPYTESTAHKWGWQWRIPLQHRTGNGMVFCDKYCSDDEALATLTNNISGKHLTEPKFISFTTGKRKELWKGNCLALGLSTGFMEPLESTAIHLMMKGVIKFAEMLPDQRCQQATINEYNRIMDIEFLSIRDFIILHYCTTSRTDSKFWQDCQNMPIPASLVEKLALFKSQGRLFRSEFDLFTPPSWYAILAGMNIKPDNYDRLIDISDINQVNSIMTNGLTSLNNTIIQLPSHEAFVKQFCKNI

SEQ ID NO: 70 - protein, 578 aa, Penicillium nalgiovense
MAAIQTVPEQCTVLVVGGGPAGSYASSALAREGISVVLLEADNFPRYHIGESMLPSMRHFLKFIDCYEKFDAHGFRVKNGGAFRLNWSRPESYTDFIAAGGPGGYSWNVIRSEADEILFRHAGESGASIFDGTKVTGIEFEESSEDVVDSANPNPGKPVSATWSRKDGSTGLVKFDYLIDASGRAGLVSTKYLKNRRYNQGLKNVASWAYWTGGGTYGVGTHKVGAPVIRTDASGWVWFIPLHNGTHSVGIVMNQAKATERKKAMDSPSSKEFYLENLNLVPGIQALLEKGELVSEVKSASDWSYSASSYAFPHVRIAGDAGCFIDPFFSSGVHLALSSGLTAAVTISAAIRGDVTEKEAAQWHSSKVAEGYTRFLLVVLSSLKQIRGGDEPVLNDWDEESFDRAFDHFRPIIQGTADADSEKKLSTEEISKTIDFCFRAFAHVPVERKDALLEKMKNHGVSDPTATDPKTREALEELKNTLSPEELDIMNTIRGRRMIRAEDSLNIDNYRLDSINGMAPNLERGNLTLRKAEINKIDVSKKDLLSLLSGEAAEGKHHETEETKAPAAAVAEVAEFAT

SEQ ID NO: 71 - protein, 522 aa, Sphaerobolus stellatus
MSNGVPSVPEKTTVLVIGGGPAGSYSSTLLAREGIDVVLLEASKHPREHVGESMLPSMRHYLRFVDLEEEYDRRKFMHKPGAAFKFVHGQRECYTDFSILGPDRTTWNVFRAEADEIMIRHAEKRGVKVFEQTRVESISFENDGDPATARPIAAAWKNKSGETGTIKFDWLIDASGRQGIMSTKYLKNRIYREGLRNVAAYGYWQNVSVFDEGGPRSNAPWFECLTDRYGWAWCIPLHNGKTSIGVVMHQETSNKKKAEGPSGLEAHYMEQLKLAPGIQELIGEKGTFVPGTVRSTADYSYHATSYSGDHYRLIGDAAAFVDPLFSSGVHIAMTGALSAAGTILGSLKGAVSELEAQNWHDAKIGICQTRFLMVVLSAYRQMQHQGNKAILGDVNADNFEHAFEIFRPIYQGEQDTSTKLTDDELEKMIEFTRNLFTPTTHQQYASVKQRHGDMLDLSAPVVSPGELDKVLDTEDSDAKAVLKRINSLKILRNETSPLSFTSEAVNGYILRLERGNLGLVKA

SEQ ID NO: 72 - protein, 539 aa, Panaeolus cyanescens
MSTEGPIPTKTNILVIGGGPAGSSAATILRREGHEVTLLEMAKFPRYHVGESMLPSLRNYLKFLGVEEDFVKHGFLDKPGACFKLVPNLRESWTDFTALGPGYATWNVVRSEMDEILLRHSAKEGVKVFEETKVDSIQFEGDPKTSRPISANWSKKDGTSGNITFDWLIDASGRNGIMSTKYLENRQMRENLRNVAVWGYWKDVNRYGVGTKKANSAWFEALRDETGWSWIIPLHNGTTSVGFVMHITNSNKKKARLNPDGTKMSLTDHYLDQLQYAPGVRELIGEKGSFIPGSTKSTSDFSYSATRYSGDHFRLIGDAANFVDPFFSSGVHIGMTGALSAAATICASIKGEADETTAQAWHDAKVGIAHTRFLFVVLGAYRQMHLQSTPLLGEVHEESFDKAFEMFRPVIFGLADSQKKLTDAKVNDVMDICQSFFDPTVDEDHIHATRQRYGVDLVKMQAPVLGKDKIQELVKDDEVGERVLKKFDALKVFSDDVEATYMGRNPLLGYRANVKRGELGLIKADEEDPLEKDILVAAP

SEQ ID NO: 73 - protein, 543 aa, Asticaccaulis sp.
MFLTCRRRLLDGAGFFLRLDTAMTTPKSGHRDAFFVLNGIEMTTTGPLRKIVIVGGGTAGWMVANALSKVLGKSGPAITLIESEEIGTVGVGEATIPPILAFNALLGINEVEFMKETQATFKLGIEFVDWLRIGHRYFHPFGIYGVDAGAVPFEALWQRSRHLGTPRPLNDFSVCARAAAMGRFMRPAGAGGPLAHLAYAYHFDATLYARFLRKYAEAAGVTRIEGRIAHTSQRPDDGFIEAVTTQDGRRIEADFFIDCSGFHALLIGGVMGAKFEDWNHWLPNDRAVAAPSANMAPPTPFTTSTSRTAGWQWRIPLQHRTGNGYVYSSAHSSDQAAQDLLTTNIAGDLLAEPRVIKFRTGRQRAFWIKNCLALGLASGFMEPLESTSIHLVQAGIARLLEMLPNRSCDPADIRRYNRLMTTEYDSIRDFIILHFHATERRDTQYWRSLANMSIPDTLAERIDIYRHSGRVFRESDDLFSKTSWLAVMDGQGLVPQAYDPLAEGVSPEQAQKHMEHIASVQAAAVKTMPSHHNYIAKYCSTAQ

SEQ ID NO: 74 - protein, 548 aa, Stachybotrys chlorohalonata
MSIPDSCAVLVVGGGPGGSYAASALAREGVNVVVLEADHFPRYHIGESMLASIRHFLRFIDLEKTFDSYGFCKKVGAAFKLNNKREGYTDFIAANGPNGYSWNVIRSEADKLMFEHAEKSGAFTFQGVKVESLQFVPDDGVAKDDTVCNPGRAISASWLRKEDGVTGNIKFDYIIDASGRNGIISTQYLKNRKFNQALKNVANWGYWKGATTYSPGTPREGSPVFEALTDQSGWCWAIPLHDNTLSVGVVMRQDLSLARKKSLGSPSMVEFYKDCITLSPDIHARLADAELVSNIKAASDWSYSASTYAGSNFRLVGDAGCFIDPYFSSGVHLALASALSAALTIQAARRGDCNELDAAKWHSAKVAESYSRFLLVVMTALKQIRKGDEPVLSDFDEDGFDRAFGFFKPIIQGLADADVGGKLTQGLISKSVDFCFHAFQDITPNVRQAVLDKLDSMKSDPSVETKEDLEKLSEDELTILRTIRARQMLRTEDTMNITSFANDVIEGYAPRLVCGSLGLSGMESRMAAPSNAETLFDSGIEILDENKS

SEQ ID NO: 75 - protein, 560 aa, Verruconis gallopava
MTTIPEKATVLVIGGGPGGSYAATALAREGVDVVLLEADKFPRYHIGESMLASMRHFLRFIDLDSTFDNHGFIKKRGAAFKLNDKPEGFTDFIAAGGPGNYAWNVIRSEADYLMFQHAGKSGVKTFDQVAVRSLEFTPCDLELPDPKTPSPGRAVAACWSSKVDGTSGKISFDYLVDASGRFGITSTKYLKNRKFNQGLKNIANWSYWKNAGRYAVGTQREGQPFFEALSDASGWCWLIPLHDGTASVGIVQNQDAAAAKKKAMDSPSQHDFYIESLKLAPRIQALLAQGEMTAPVKQASDWSYSASCYASPNVRIVGDAGCFIDPYFSSGVHLALSGAMSAACTIRAVQREECDEKAAMDWHSKKVAEGYTRFLLVVLSAMRQIRKSDQPILSDWDEEGFDRAFAFFRPIIQGTADVSNKLSQEELAKTIDFCLNAFQHHDADARDAMIKKLQEHEQEARMRGDVQAKADIDPDSLTPEELQVLKTIRARQMLRTEDVINIDSFGTDAIDGFAPRVKHGELGLMKGKNSGPAAPKMDLFAKAKEEPAMQTQVGTAVTAH

SEQ ID NO: 76 - protein, 552 aa, Trichophyton rubrum
MSIPASCTALVVGGGPAGSYAASALVREGVDVVLLEADVFPRYHIGESMLPSIRHFLRFIDLDSKFDSYGFVQKNGAAFKLNSKPEAYTDFVAAGGPGSYAWNVIRSEADHLIFKHAGENGAKTFDGVKVNAINFEPLSEENSDPVSTDLGRPVSATWTRKADKSSGVIKFEYLVDATGRAGLVSTKYMKNRTYNQGLKNVATWGYWKGASSYGIGTPREGDPYFEAIADGSGWVWLIPLHDGTTSIGVVMNQAMATTKKREAGSSSQQFYLDNVKQIPGIWQLLDNAELVSDLKSASDWSYSASSYASPYLRIAGDAGCFIDPFFSSGVHLAFASGLSAALSIRAAQRGDCDEMAAAEWHSKKVAEGYTRFLLVVMSALKQISDRDEPVLTDWDEESFNRAFDLFRPIIQGTVDVDKTLTQAEIAQTINFCVNAFQNAGREEQDALMNKIKSVSETKNGEETDVVKKLKESLSADERRTLNTIQARQIIRSEDTMNIDNFTVDVIDGMVPNLKRGSLGLLRYVPKVKAGQQEDELRAKLGLPEKQESIFSY

SEQ ID NO: 77 - protein, 554 aa, Penicillium nalgiovense
MSIPEQTSVLVVGGGPAGSYAAAVLAREGIDTVLLEADLFPRYHIGESMLPSMRHFLRFIDLDETFDKYGFVQKVEFHLHKAIKKGAAFKLNSFPEAYTDFVAAGGPDAYAWNVDRAEADNLMFQHAGKSGAKVFDGVKVTSIEFTPLDEQNGQTDSELPSPGRPVSASWARKDGTSGTTQFEYIIDASGRAGLVSTKYYKNRTYNQGLKNIASWGYWENAKIHAPGTQREGQPFFEALQDASGWVWTIPLHNNKTSVGVVMNQATATTKKKAMEDSSTKGFYIDTLKSTPETYDLIADAELVSDIKSASDWSYSASTYATPYIRIAGDAGCFIDPYFSSGVHLALASGLSAATTICAAKKGQITESAAADWHSNKVGTGYTRFLVVVMSALKQITKPEEPVIGDWDEKSFDRAFSMFKPIIQGSADVKSNLTSEEISQTIDFCMKAFHPAPKEQREAIFDKLASGSASASGSANPTLSEQTLSADEQRILTTMRARNAIRTEDLIHIDNFSVDVVDGMIPRLKRGELGLIDAATAHIKAPNADTKQSVSIFSY

SEQ ID NO: 78 - protein, 548 aa, Stachybotrys chartarum
MSIPDSCAVLVVGGGPGGSYAASALAREGVNVVVLEADHFPRYHIGESMLASIRHFLRFIDLEKTFDSYGFCKKVGAAFKLNNKREGYTDFIAANGPNGYSWNVIRSEADKLMLEHAEKSGAFTFQGVKVESLQFVPDDSLAEDDTVCNPGRAISASWSRKEDGATGTIKFDYIVDASGRNGIISTQYLKNRKFNQALKNVANWGYWKGAKTYSPGTPREGSPVFEALTDQSGWCWAIPLHDNTLSVGVVMRQDLSLARKKSLGSPSMVEFYKDCITLSPDIHARLADAELVSNIKAASDWSYSASTYAGPNFRLVGDAGCFIDPYFSSGVHLALASGLSAALTIQAARRGDCNELDAAKWHSAKVAESYSRFLLVVMTALKQIRKGDEPVLSDFDEDGFDRAFGFFKPIIQGLADADVGGKLTQGLISKSVDFCFHAFQEITPDVRQAVLDKLDSVKSDPGVETKQDLEKLSEDELAILRTIRARQMLRTEDTMNITSFASDVIEGYAPRLVCGSLGLSGMESRTAAPSNAETLFDSGIEMLDENKS

SEQ ID NO: 79 - protein, 545 aa, Bipolaris oryzae
MSIPEKTDVLVIGGGPAGSYAASVLAREGVDVVLLESDKFPRYHVGESMLASMRFFLRFIDLEKTFDAHGFQKKFGATFKITEKKAAYTDFAAALGPGGFSWNVVRSESDELIFKHAGESGAKTFDGTKVESLTFESYSDGEFSAENHLANPGRPTTATWSRKTGETGTIQFGHVIDASGRNGIISTKYLKNRRFNQGLKNIANWTYWKGATKYNAGSETENSPFFEALSDGSGWVWAIPLHNDTLSCGIVVYQELFFAKKKASGLDGLSFYKEYLKLAPQINSMVANAEIVSEMKQASDWSYSASAYAGPGFRIVGDAGCFVDPYFSSGVHLALTSGLSAAVTIQAVRRGQAGEEQAAKWHATKVSEGYTRFLLLVMTVLRQLRMKEAALITSEQEEGFDMAFKTIQPVIQGIADTNTEDADVQKRTAKSINFGLESMNVSSAAEDAVVKKIREAENRPEMLEKLTTEEVSILDRITKRTFAHEKDELNLTHFTGEVIDGFSARLVRGDLGFVNHAAQPATADQPVVSAAVDMSGLDRNIKQAA

SEQ ID NO: 80 - protein, 545 aa, Bipolaris sorokiniana
MSIPEKTDVLVIGGGPAGSYAASVLAREGVDVVLLESDKFPRYHVGESMLASMRFFLRFIDLEKTFDAHGFQKKFGATFKITEKKAAYTDFAAALGPGGFSWNVVRSESDELIFKHAGESGAKTFDGTKVESLTFEPYSEGKFSTENHLANPGRPTTATWSRKTGETGTIQFGHVIDASGRNGIMSTKYLKNRRFNQGLKNIANWTYWKGATKYNAGSETENSPFFEALSDGSGWVWAIPLHNDTLSCGIVVYQELFFAKKKASGLDGLSFYKEYLKLAPQINSMVANAEIVSEMKQASDWSYSASAYAGPGFRIVGDAGCFVDPYFSSGVHLALTSGLSAAVTIQAVRRGQSGEEQAAKWHATKVSEGYTRFLLLVMTVLRQLRMKEASLITSEQEEGFDMAFKTIQPVIQGIADTNTEDADVQKRTAKSINFGLESMNVSSAAEDAVVKKIREAENRPEMLEKLTTEEVSILDRITKRTFAHEKDELNLTHFTGEVIDGFSARLVRGDLGFVNHATQSASADQPAVSAAVDMSGLDRNIKQAA

SEQ ID NO: 81 - protein, 542 aa, Arthrobotrys oligospora
MAIPQSCTVLIVGGGPAGSYAAAVLAREGIDTVVLEADKFPRYHVGESTIPSLHYLFKFIDFHETFSSYGFNQKNGAYIKLAKNQPVTSNDFRALQGPNGFAWNLIRSEFDDLVFRYAGTCGARIFEETKVENIEFEPCSIQTVPGSKEDSSGLFHARKPVSANWVRKIDGTSGSITFKYLIDASGRQGVLSTKYLKNRKFNENLKNVASWAYWKSDNVYAAGTPTEGAPYFEALEDCSGWAWYIPLHNGTRSVGIVQDQKLMAKKKASLGRPSTLEFYNECIKMAPTIKDLLKGAEFINNIQSASDWSYTASTYHIPNARICGDAGAFIDPLFSSGVHLAMNGGLSAAATICASIRGHCDEATAGSWHSKRTVESYTRFFLVVSSVTRQMRQQNEPILRDNDEEGFERGFQIFRPIILGAVDNNIGNKHSKVGIAKALEFCFEAFTRVTSETKDSTPQDPKTLGFSSGNNTITSHRNLEGLRQNLTPNQIEILETLTSRRMIRDDRFEIDSHTFDTIDGYLLNAVRGKLGLVKAEQVKVNI

SEQ ID NO: 82 - protein, 908 aa, Aspergillus niger
MTVPQSCTVLVIGGGPAGSYAAAALAREGIDTVLLEADKFPRYHIGESTLPSLRHFFKFIDFYDTFDAHGFYHKNGAVFRLAQAQPDAYTDFLEAGGPDAYAWNLVRSESDDLLFRHAGTCGAHIFDETKVDTIQFEPHISESSKPDSDDNKILNPGRPVSATWVRKDGSSGFIALKYLVDASGRNGILSTKYLKNRKFNDNFKNFANWAYWKTDNLYGLGTHMEGSPYFEALDDASGWAWFMPLHDGTRSVGVVQDQKLVTEKKRELGRPSTLDFYKQCVEKAPRTSKLLSGAEIVTTVRTASDWSYTASTYHIPNARICGDAGSFIDPLFSSGVHLAVTGGLSAAATIAASIRGDCDEETAGSWHSKKTVESYTRFFLAVSSATKQIREQYEPIIQDMEEEGFQRAFDLLRPIIQGTVDADDTGKISHSEISKALEFCFRAFTYVPPEKKDALFEKLKNLGVGSGQKDAREAKILDGLEQHLTTDELQVLEILRSRRMIREDPFEMDSFTLDTIDGMAPNLGSFLFTAISGRLLAAVAVHAAPAEPAHPMVTEAPDANLIEKRATTCTFSGSEGASKASKSKTSCSTIYLSDVAVPSGTTLDLTDLNDGTHVIFQGETTFGYEEWTGPLVSVSGTDITVEGESGAVLNGDGSRWWDGEGGNGGKTKPKFFYAHDLTSSTIKSIYVENSPVQVFSIDGSTDLTMTDITVDNTDGDTDDLAANTDGFDIGESTYITITGAEIYNQDDCVAINSGENIYFSASVCSGGHGLSIGSVGGRDDNTVKNVTFYDVNVLKSQQAIRIKTIYGDTGSVSEVTYHEIAFSDATDYGIIIEQNYDDTSKTPTTGVPITDFVLENIIGTCEDDDCTEVYIACGDGSCSDWTWTGVSVTGGKVSDDCLNVPSGISCDL

SEQ ID NO: 83 - protein, 540 aa, Pestalotiopsis fici
MSVPAQTSVLIVGGGPAGSYAATVLAREGVDVVLLEAEKFPRYHIGESMLASIRFFLRFVELEEEFDRHGFEKKYGATFKITEKNPAYTDFAASLGEGGYSWNVVRSESDEIIFRYAGKCGAKTFDGTKVESLTFEPYPHEGFDESVHLANPGRPVSANWSRKDGSSGVIKFDYIIDGSGRNGLISTKYLKNRSFNQGLKNIANWTYWKGAKRFNVGEKNENSPLFEALKDGSGWVWAIPLHNDTISVGVVARQDAFFEKKKESGLSGEAFYKEYLKLAPQIKNELLRDATIVSDIKQATDWSYSASAYAGPNFRLIGDAGCFVDPYFSSGCHLAMTSALSASVSIQAVRRGQCDELTGAKWHTTKVAEGYTRFLLLVMTVQRQLRMKDKNIISTDEEEGFDMAFKKIQPVIQGVADTRTEDEQTQRRAAEAVDFSLESFEITPEKQAAVISKIERSQAEPELLEKLTPEEVHILGNIVNRTFEREKDELNLTHFTGDMIDGYSAKLEHGNIGLYKREKALLNGTASRAAAVLKSIHQVA

SEQ ID NO: 84 - protein, 521 aa, Nectria haematococca
MSVPSQTSVLIVGAGPAGSYAACVLAREGVDVVLVDADKFPRYHIGESMLAAIRFLLRLIDAEEAFDKHGFEKKFGATFKITDKREAFTDFSEALGPGGHSWNVIRSEADELLFKHAANNGAKTFDGTKVDSINFEPLPDFEMGEGSHLANPGRPVSADWSRKDGTRGNIKFDYLIDASGRNGIICTKYLKNRKFNEGLKNLAQWTYWKGAKRFNVSKRNENSPFFENLDDASGWVWAIPLHNGTLSVGIVARQDLFLAKKKELGLSGQEFYREYLKLAPQISEMLSNAEIVADVKQASDWSYSASAYAGPYFRVAGDAAAFVDPYFSSGVHLALNNGLAAAVSIQASRRGQADERAAAKWHATKVAENYTRLLLIVMAVQRQLRLKHEELITSNSEDGFDTAFKAIQPVIQGVADTHESDASVQNKAVESVNFALESFEVTPEQEKLMTEKVVQAAQRAPETLQKMTPEEVDILKRMSHRVLHRNTNRNNKGLVDFTGQVIDGFSAILERGDVGLIKVED

SEQ ID NO: 85 - protein, 535 aa, Hydnomerulius pinastri
MTQTIVPTQAQILVVGGGPAGSYAAAVLAREGFDVVVLEAAAFPRYHIGESLLPSVRHFLKLIDAECLVAAHGFTAKPGAAVKLNQHMREGYTDFIALNPNHGAWNVIRSEFDDLLLRHAAKCGATVIQRTRVSEIYFDEDNPDCPISASWKNESGIEGRIRFDYLVDASGRSGIMSTKYLRNRRFNKSLQNTACWGYWEGAEVYMPGTSRENAIWIEALNDESGWAWFIPLHDGSASVGLVMDQKISMSKKSAAREFSGASDYRLEDHYLSELKRAPGVLKLLSRAKLRSKGEKEAVKTAGDFSYSATSYAGDHYRLAGDAGAFIDPFFSSGIHLALTGGLSAALTISASIRKTASEDLAQRWHSSKVGTSYTRFLLVVLGTYQQIRSQTVPIMSDVDEDNFDRAFSLIRPVIQGTADVGRVVSEDELQKTMGFCRHIFAPTDPEMHSAVNTRLGSEILSPSGPVLTEAQINELVAQDDLEAKLVLCEVNARKPIHAMYSPTQHFQLEAHLGHAAVLERRKLGLRRVTPCDTEL

SEQ ID NO: 86 - protein, 516 aa, Gymnopus luxurians; identical to SEQ ID NO: 18

SEQ ID NO: 87 - protein, 506 aa, Botryobasidium botryosum
MNVPTHTEVLVIGGGPGGSYAAAALAREGIEAVVLEADLFPRYHIGESMIASVRHFLRIIGLDEKFDNYGFTRKVGAAFKLNDFKREGYTDFLARGPQNYAWNFIRSESDELMFRYAGECGAKIFDGIKVTDLISQTGDIVSTRPTSAHWKSKSGSFGIITFDYLIDASGRAGILSTKYLKTRTFNQELKNVATWGYWTGCSVYGAGTPRNNSPFFEALQAALLLALVAIDESGWAWMIPLHNGTTSVGIVMNQEISNKKKANHPSGRSPSMQEHYLEQLKFAPSILALVGPGELVKDATTGSVVKSASDYSYSASSYAGDHYRIVGDAGAFIDPFFSSGVHLALAGALSAALSICAARRGDCTEEEAAVWHSSRVSTSFSRFLVVVLAAYKQMRAQAQPILASADEPDFDRAFEQFRPVIQGSADVDHSTSARHASEAGSGCARPIEFCEQSDTTRPGGDSTAPKGPMWKTRTEDTFHIDHFATGVINGFCPRLERGSLGLTPVD

SEQ ID NO: 88 - protein, 523 aa, Sphaerobolus stellatus
MASNSDNAMLPAKVTVLVAGGGPSGSYAASILAREGINVMVLESQKFPRYHIGESTLASIRHFLRFIDLEKTFDEYNFAKKFGAAFKLNQTRDDNYTDFVASDPSNYAWNLVRSESDHLMLQHVVSCGGLVFEETRVTDVDFEPVLGSSETRPVSAKWRNKAGQTGTVSFDYLIDASGRQGLLSTKYLKNRVINADFRNVAVWGYWSGCAEYKPGTLRAGAPYFEALTDSSGWAWLIPLNLKYTNESGTASIGIVMNQEIADAKRKDNVNSKPLSAQEHYLQTLELAPTLKSMIEDAELLRPAGEPVIRSASDYSYSAQSYAGLNYRIVGDAGAFIDPYFSSGVHLALLNGLSAAATICASMKGECQESDAAQWHTTRVDTSYTRFLIIVKSIYREIRSQQTPASSENGFDKEFEEIAPVIQGHIDCRTELSASDMEKLVDFYSRHAYEPSTTEERTNILARVQDGSFNNSTLTKRENAILNSLKVRKLYRLEDINRINHFVEDNIHGRRLKLERGRLGLVEA

SEQ ID NO: 89 - protein, 609 aa, Piloderma croceum
MIFPPPHHPPKHVQVLVIGGGPAGSYAAAALAREGLDVAIFEATKFPRYHVGESLIPSIRHYMRFIGAEEKLANHGFVRKPGSAIKFNQFKREGYTDFVALGHNNNAWNVVRSEFDEILLKHARSSGAKVTELIRVKSLSFSSTDPSKPISACWTHSPSFCFSSSSSSSSSGTDDDLPNAPITGTTTFDYVIDATGRAGLISTNYLKNRHFNASLKNIAIWGYWKDVDTYGVGTEREGAPWFEALTDESGWAWFIPLHDGTTSIGIVMNQKIFNADAKTTDSSPSPSLTSRYRSYLPLAPGLLELIGDGVLTTKPVSPPNSPNGSDSTANDFRSKEPLVKSATDFSYSADQYAGHGYRIVGDAGSFIDPFFSSGVHLALTSALSAASTICAALRGDCSEQEAAEWHTKRVATSYTRFQVVVLSAYKQIRAQSTDVLSDINEDNYDRAFGFLRPVIQGASDMGTRLSENELQKSLDFCVNLFSPTSPEQHERVANSGVSKNLLDVNAPLMDSDTLEGALRKLAETKMVVNKINARRVVHSEYAINNLESEGLNGYVVRLEKGKLGLTRVLLRTLIPFNLLRILPNVRDEAVFDLISDTSSDLEKNFAKSS

SEQ ID NO: 90 - protein, 527 aa, Botryobasidium botryosum
MSAAVPQKTQVLVIGGGPGGSYAASALVREGHEVVLLESAKFPRYHIGESMLPSMRHFLRFIDLEDEFEAHGFAIKPGAAAKFTAHKKEGYTDFVEKGQTKGTWNVIRSEADEIMLRYAGRQGANIIEETKVTSINFAGDPAESRPISAEWKNVQGQTGTIEFEWLVDASGRDGIMSTKYLKNRRFNEAFKNVAFWGYYTGTGKYEPGTHRENAPFFEALNDESGWAWFIPLHNGTTSVGVVMNQEVYTQKRKSEKATRPSLQEHYEGQLAEWAPTIMRLIGEGKIKTNVEGPTVKMASDYSYNAPSYAGDHYRIAGDAGAFIDPFFSSGVHLAILGALAAATSICAEIRGQCKSADAEKWHTDKINVSYTRWLLVVMSAYKQMRASNEPVLADVDEESFDRAFDFFRPIIQGSSDYGKSLTRDELNKAIDFCGAIFHEFKPEDIDAAVERAGPAVLEGNAIPGAAPAAVDPEDEKAQEVLKLLSASKHVMTKEQDHGLHVFGADAVNGLKVILERGNLGLYRVDSE

SEQ ID NO: 91 - protein, 394 aa, Aspergillus carbonarius
MAIPQKATVLVIGGGPGGSYSASALAREGIDTVVLEADVFPRYHIGESLVASIRPFLKFIDLDDTFVNYGFVRKNGAAFKLNNQKEAYTDFILEAGADTFAWNVVRSESDDLMFKHAAKSGAQTFDGVRVTSIEFTDDDDDDDNNTNRPVSASWKAKDGRTGSIEFDYLVDASGRAGITSTKYLKNRTFNNYLKNVASWGYWEGATPYGMGTPVEGQPFFEALQDGSGWVWFIPLHNNTTSIGIVMNQELSTQKKKLSTTTSSRAFYLESLAGARGISRLLDPTTATLTSDIKHASDWSYNASAYGSPYLRIVGDAGAFIDPYFSSGVHLAVSGGLSAAVSIAASIRGDCPEEAAWKWHSQGVANRYGRFLLVVLGATKQIRAGDRPVLNGVGD

SEQ ID NO: 92 - protein, 552 aa, Rhizopogon vesiculosus
MSQQIPKNAQIVVVGGGPSGSYAASALAREGLDVVLLEAAHFPRYHIGESLIPSVRHYLRFIDAEQKLVDMGFKHKPGAAMKFNQFKREGYTDFVALGHSNSSWNVVRSAFDKMLLDHATSCGTKVFERTRVESFRFSATDNSRPVAAEWFCAADGKRGVISFDYLVDASGRSGLMSTKYLRNRHFNASLKNVAIWGYWVGVSKYGINTPREGAPWFESLTDESGWAWFIPLHDGTTSIGIVMNQAIYNEKVRTLKGSSLEDRYRFSISLAPGLVRLIGSGRIVQKEGVERQSGQFDLLIRSASDFSYSASSYGGPGFRLVGDAGAFIDPFFSSGIHLAMTSGLSAAVSICAAVRGDCSEIDAAAWHTKRFSLSYTRFQMVVMSAYKQIRSTDLEILTEVDEDNYDRAFAAIRPVIQGAGEMGSRLSEKELESALEFCSKCFNPASHEHLAFAAKQDLPKDILDVTGPIIDPQVIDSVISKTSEHMDSKGGQQLFGSVEDLKLLLDQINGRRVVHREYTINNFEVEDVNGFVVRLRKGYLGLMRTSTTSKVN

SEQ ID NO: 93 - protein, 587 aa, Hebeloma cylidrosporum
MPSALSVSSLPPKLTQVLIIGGGPAGSYAAAALAREGIQVTLLESSKFPRYHVGESLIPSARHYLRFIDAEKKMINCGFARKPGSAIKFNQYKREGYTDFVALGHNNNAWNVVRSEFDLMLLNHARTTGASVYEQTKVDSISFSSSDPDRPISVSWTHTPPPCPPSPPASPTDGVFPSLFSSKIVTPDQPPPPARGETAFAYLIDASGRAGILSTRYLKNRHFNASLKNIAVWGYWKNASQYGSGTAREGSPWFEALTDESGWAWFIPLHNGTTSVGIVMNENMYKAKYQQPPSSVFAAGSSSNSHVTIRYLSNISLAPGVVKLITPSGVLDEGSVKSASDFSYSAPSYAGNGYRIIGDAGAFIDPFFSSGVHLAMTSALSAAATICASIRGHCSETRSADWHTRRVSTSYTRFQVVVLSAYKQIRAQSHDILSDINEDNYDRAFSFLRPVIQGASDMGARLSETELQKSLDFCLNLFNPTTPEQHECLSHYGDVAKELLDVAGPVVDPSIFERSLHVSQASMGDTEDAANSSDCEKAVETRMILNKINARRVVHPEYAINNLETESLDGYVVKLERGKLGLTKAPF

SEQ ID NO: 94 - protein, 542 aa, Paxillus involutus
MSSAIPTHTQILVVGGGPAGSYAASALAREGLQVILFEAAQFPRYHIGESLIPSVRHYLRFIEAEQKLAEYGFKHKPGAAIKFNQFKREGYTDFVALGHSNSSWNVTRSAFDKMLLDHARESGACVHEKTRVNSLRFSSSDPSRPVAAEWSQSSETDHSGVISFDFLVDATGRGGLMSNKYLRNRHYNESLRNIALWGYWSGVGAYGGGTAREGAPWFEALIDDSGWAWFIPLHDGTTSIGIVMHQELHNEKSKALHGSSTVSRYQAFLSLAPNLTALIGRGVLVSKLSVDGPPGSLDPLVRSASDFSYSASAYGGNSFRIIGDAGAFIDPLFSSGVHLAMTSALSAAASICGSIRGDCSEAIAAAWYTRRFSLSYTRFQMVVLSAYKQIRATNFDVLNDVDEDNYDQAFASIRPVIQGASDMGTRLSEAELQGALDFCSKLFSPTSPEQRACALRYGLPTKVLDVSAPLLDPKDIDAALSRVEGISSDGNLNHDARLVMEHANARRVLHREYAVNNLEAEEIGGHVVRLERGSLGLMKLRG

SEQ ID NO: 95 - protein, 519 aa, Amanita thiersii
MDTVPSSTTVLVIGGGPGGSYTASVLSREGFDVTLLEAVKHPRYHVGEGMLPSMRHFLRFVDMEEEFHNHGFKHKPGATFKLHHSTPETFTDFSTLGPSRTTWNVIRSEADEMLLRNASRQGVKVFEETRVTSIDFEGDPATSRPIAADWTNKKGESGKIKFEWLVDASGRAGIMSTKYLKNRNFREGLRNIATWGYWRNVKIYAEGTKRSNAPWFEAMTDGLGWAWLIPLHDGTTSIGIAMHQNVSDMKKKNHPGGKPSLTEHYLDQIKFLPGVLELLGEQGELVPGSVKSSTDYSYSASRYSGDHFRIAGDAASFVDPFFASGVHIAMTGALSAATTICASAKGQVTESEAQHWHDAKVGICHTRFLIVVLSAYKQMQSQNRPVLSDVSEDNFDRAFSLFRPIIQGAADTTNKLTEEELEGMLDFCMHLFDPGEHAGVAQRLQPDLLALHGPVMGSAELDKALPPEDVEAKKFLSRFNALKILRNDTSPESFGTEAVDGYTVQFERGHLGLVKAPST

SEQ ID NO: 96 - protein, 534 aa, Hypholoma sublateritium
MSTPAIPSHTTVLVIGGGPGGAYSSTVLARDGVEVTLFEAAQFPRYHIGESMLPSINAFYAFVGAQDKLRAAGFCPKPGAAVKLQQGKKEAYTNFIERNEHDASYNVVRSELDEILLRHSQEAGTAVFEQTRVTDIVFDEKAPESDPRPIGANYVRNGTTGYISFDYLVDASGSKGLMSTKYLKNRKMNQTLHNIACWGYWSGQGMYMPGTYRHNAPWFEALSDESGWAWFIPLHNGTVSVGFVMDKAISIQKKADLREKDPEAFSLKAHYLDQMQYTPGLRELLKNATMKDGDLEGSGPVKSTSDFSYSASNYAGDHYRLVGDAACFIDPFFSSGCHLAHLGGLSAAMTICASLRKHCTEAQASHWHDTKVATSYTRFLIVVLSAYKQIRSQVNNILSDVDEDNYDRAFDFFRPVIQGTADVGKKLTEDELQKTIEYCTNIFLPGDPELRESVGERIGVEMLSNTQPIMSMDEMEKITGGEEDAMMALKQVNARKPLVGLYGALDSMKSENIGGLVAVLTRGQMGLSVAEPAT

SEQ ID NO: 97 - protein, 613 aa, Termitomyces sp.
MSSLKHPPQVPFSDRRPPSADPFQHTQVLVIGGGPAGSYAASALAREGLDVTLCEAATFPRYHVGESLIPSARQYLRFIGAESALVDHGFVFKPGSAIKFNQFKREGYTDFLALGCENNAWNVVRSEFDQLLMNHARASGAAVYERTKVTDVSFSSTDPTKPVSVTWSHTPTPSVSPSTAPWAPLTSFLGKIMSPLTVLKSPVITGTTTFNYLIDATGRAGLLSTKYLKNRHYNASLKNLAVWGYWKGTTLYGAGTARQGSPWFEALTDESGWAWFIPLHDGTISIGIVVNHKIFDRALKQPLPPSPFSHPSTFNPTNSKIIAYYLSALALAPGVVELITSGGSMVEGSVKSASDFSYSAASYAGSNYRIVGDAGAFIDPFFSSGIHLAFTSALSASATICASIRGHCPELSAAEWHSRRVSTSYTRFQIVVLSAYKQIRAQKMDILCDIDEDNYDRAFAFLRPVIQGASDMGVRLSETELQKSLDFCVSLFNPTSPEQHERLSRSSGLCNEVFDINAPLVDPAIFRDALQIGFQSLDSCSEIDSDSDTDGDQSFSESDRVLETKLILEKINARRVIHSEYHLNNMEVESIGGYVMRLEKGTLGLARTTHKAR

SEQ ID NO: 98 - protein, 458 aa, flavobacteriales bacterium
MATKIQNIIVLGAGTAGWLTALFVRKLFPHYNIKIIGNKKIGIIGVGEATTPPFVDFLREIDIDPLAMVRETGGSIKQGISFEDWNGDGKKYFHGFYEKFLSDVSIPPIFSHDCGDYYYKHLIHKKLDFNEYSYATKLSYQNKTDLDGIAYAIHFDTNRLSTYLGKIAKERNIEYVEGEYSKMKLKYDFIFDCSGLSRLIIKDKSKWKSYRKYLPMKHAIPFHLPVKENKPYTSAIAMKYGWMWQIPLQDRIGAGYVFDSDYIDAAQAQEETEKFLGHKIDVRKVINFEAGRHEKYWVDNCMAVGLAACFIEPLESTSIHLTVLQLQLLRQFASDLFDGTNDMFNEVITNTMDEILYFIYLHYITKRKDSSFWRNFKKDYPCPPAFKPVLQAIQNNNLKHYDIKSTNRIQPGFSVTSYLQIANGLGLFKKDINIKEYTNLTPTVKEIKKFIDQKTQSI

SEQ ID NO: 99 - protein, 600 aa, Metarhizium anisopliae
MAVPPSCTVLVIGGGPAGSYAAAALAREGIETVVLEADKFPRYHIGESTLPSLRHFFKFIDFYDTVDAYGFYHKVPSSLHFFHLNEELTSPYQAKNGAVFRLAQAQPDACKSPSPAYTDFLEAGGPNGYAWNLIRSEFDDLLFKHAGTCGAQIFSETRVDTIQFEPVANGLKPDMNRNLGDNLNPGRPVSATWVRKDGTSGSITYKYLVDASGRQGILSTKYLKNRKFNNNFKNAAIWAYWKSDNVYGPGTHMEGSPYFEALDDASGWAWFMPLHDGTRSVGIVQDQKMATEKKHELGRPSTLDFYKQCLQMAPGIRELLSEAELIPHVRAACDWSYTASTYHLPNARICGDAGSFIDPLFSSGVHLAITGGLSAAATISASIRGDCSEAAAGSWHSKKTVESYTRFFLAVSSATKQIRTQHEPIIKDMDEDGFQRAFDLFRPIIQGTADADEAGKVSQLEISKILHFCFKAFTYVPPEKKDALFDKLRKLDSKALQDDAKQVQTLDGIEKHLTADELQILEILRSRRMIREDPFEMDSFTLDTIDGMAPRLVRGTLGLVNYEQAKIDKAHFYSQDFLDGNYPGIREGSVHLPTSRVQLG

SEQ ID NO: 100 - protein, 398 aa, Deltaproteobacteria bacterium
MKICIIGGGTSGWWCAAYMQKFLDAEITLIESKEIPTSGVGESSLPQIGAFFEELGIPEEEWMNGCNAVHKYGNMKYEWDGVGKDPFLMTFWQDDPKGRFDKWYQEYKSGVKDKNSHTELYNRDGWRSVAYHLDANLANSVVKDYCKDVNHIIDTLDELPEGYDLYVDASGFARKFTTDKTEVIWDHHLVNSAWVCPFQLEGEINPYTQTIARECGWQFIIDLQNRTGSGYVYSDKYISDVQALEHFKGWTEGRKNYNNIVPRLIKWRPNVLKNSWKDNVVTIGLGQGFVDPLEANGLYMVVYSITLLVKCILKGSKPEAYNKAMLKVQKQNSDYLLHHYMLSDRKDTPFWEYYSKFDMDESLWKNYKKYPNKYNNLYPDALWAQLGIYFEKFKHYTP

SEQ ID NO: 101 - protein, 564 aa, Ophiocordyceps unilateralis
MAVPKSCTVLIIGAGPAGSYAACCLAREGIDTVVLEADKFPRYHIGESTLPSLRHFFKFIDVDDAFDAYGFFKKGSSRNGAVFRLNQAHPDALTDFIEAGGPDGYAWNLIRAESDDLLFRHAKACGAHTFDETKVDSIQFERGTDRTCFGEGQDKAMDSGRPVSATWSRKDGSAGTIAFKYLIDASGRHGILSTKYLKSRRFNRGFKNVASWAYWKSDNLYGQGTSWEGLPYFEALQDASGWCWYMPLHDGTRSVGIVQDQAMATDKKRKLGKPSTSEFYRQSLELATRTNELLSGATLASDIKSASDWSYTSSTYHIPYARICGDAGCFIDPLFSSGVHLAIAGGLSAAVTIAASLKGDYDEETAGSWHSKKTVESYARFLLAVCAATKQIRYEDEPVMHDFDEEGLQRAFDILQPIIQGTVDGEARGRTTDIEVSQVLKFCFRAFNYVPHEKKEALFEKLDRLDPGFGEGDAAKRIEEMHKHLTAEEMEIVEALRSRRLIREDVFTLGSFTLDIIDGLAPRLVRGELGLVKASKARLDSRHFLSAPFLDGKVEAIRTHGEGI

SEQ ID NO: 102 - protein, 516 aa, Amicolatopsis coloradensis
MVIVGGGTAGWLSAAYLNRAFGGKVDITLIESPRIPRIGVGEATVPTLRTTFAFLGMKEEDWMPKTNAVFKSAVRFNDWRKPHEGRDSHTYYHPFFDVPEPAVQNYEKPFHKRFGRGVSLAHFWLKQRLAGDTRVRETFGDAGMALQRLCELNKAPKPLPGTDAPDPGYRYAYHFDAALIAKYLRELATGRGVKFVSADVTSVTVDPRGTIEKVVTDTAGEIEADLFLDCTGFRGLLINKTLNEPFVSANDVLLCDSAVALPARHREGGLRPYTSATAKPDGWIWEIPLADRDGTGFVYSSAFTTPDKAERRLREHLGGRGYDIDGNHIKMRVGHNRRSWVNNCIAVGLSSCFVEPLESTTIALIEYQLALLVLHFPDSDFDERRKARYNELMVGAFEDLRDFIVMHYTLTDRDDTEFWNAVREAPIPASLEEKLTEYAESVIIPDGSQLRLFETRSIWAILSGMDFGFKKAPPSVEKMNDAAAWEMFEKIDKEREIYSAGLPGHREYIEALHRGF

SEQ ID NO: 103 - protein, 507 aa, Aphanizomenon flos-aquae
MTKNIVVVGGGSAGWLTALTAKKKYPKLNVTVIESKDIGILGAGEGSTPYLPLFLETLDISIEDLVKNCDATIKNGIKFSNWNNDNDFYYHGFGFIDPSLGTEALSSKFLSASPMLVSSIALNNDLKDLDFTENVSEKNKVPFVLEKNKSGKTVSEYKKIGKTSFHFNATKLAERFKDIGLERGIEVFENTITKVSLDENNNVVGLDLDSGITIPSDFVFDCSGFHRLIIGKTFNSKWKSYKEFLPVDSAIPFFLDMTEKIPPYTEAIAMKYGWVWKIPLQNRFGCGYVYDSSLISQEEAIKEVEEFLGFTPYYPRKDKGGFSFSPGSFEEPWQNNCVAIGLAANFVEPLEATSLWVSMVALTEIFSSPDFLTNNSDEIRSEFNKLILNMNDDILNFIYLHYMSLRKDTEFWKKFSYEMAPDELKQKLKVWEKRMPGKRDNGNFWNSASWFVVASAQEKINKGLAQEYVDMSDEYKKAVDSYEYYKKYREYKVTECTDHRQFLEGLK

SEQ ID NO: 104 - protein, 526 aa, Rhodobacteraceae bacterium
MTFWPRMATGCRNGRACHSARQAKTMWPRRICVVGGGTAGWLAAMMLGDSARRGGHPCEVTVIESSKIGTIGVGEGTTAVFRQMLQHFGLDEMEFLAETGATIKFGIRHRDWRRLGHSYDGPIDDPHRVTGFEVNALDLYQVSRGESVGQVHLFQHLLSRNKSPFAVVDGRHIAVGPFHHAYHFDQALAGKWLRSKAKAIATIDDQVLRVERLAESGDITALHLEGGARVEADLFVDCTGFRRALIGPMGGTWVSYRDMLPVNRAIPFWLDIPKGEEIDPCTLAWAQGSGWMWKIPTQSRYGCGYVFSDAHITPDQAKDEIERVLGRPIHVRNDIRIDAGRLDRQWIGNCVALGLSSSFLEPLEATSIHGTVVQLMLLASVLPNPDDRARLAFNAASARQVDDFRDFIRLHYVSERRDTPFWRDVAGNLPPHLADRLAAWGGRVPGAADFAPFPMGLPHTDHHLHVPVLDGLGLLDPAKAKDWLAAHPKLRAQARAEAAKLTGEYKRAAGRAMGHRAFLDGLGVTA

SEQ ID NO: 105 - protein, 507 aa, Gammaproteobacteria bacterium; identical to SEQ ID NO: 21

SEQ ID NO: 106 - protein, 549 aa, Asticcacaulis sp
MIISRLNGKNGKPPIMTKIASEPASPPHRDVLIVGGGAAGWMTAAYLAKHLGTDRNGGPRITVMESPDIGIIGVGEGTFPTIRNILRTLGIDEAGFMRESHATFKQGIRFDDWEVTPKDGRRSHYFHPFEQPYWSREELNLLPYWLLQDKDKRLPFAEAVTFQKKVADSKLAPKRIHQGNYQGPLNYAYHFDAHRFAGVLAKYAKDLGVHHLSGNLDGVTLDADGAIAHITAKEHGDLKADLYIDCTGFRSEILGKAMGVPFKSIKDTLFTDRAVAIQVPYEKPDSPLESYTISTAHEAGWTWDIALSTRRGIGYVYSSDHTDDDRAEEVLRAYVGPMAEGVEARCIRFNAGYRTQHWVKNCIGVGLSAGFLEPLESTGMVLIESAVNKIVEFFPFRGPLDASAHIFNEAMTKRYETIIGFIKLHYCLTKREEPFWRDNTRPDSIPPHLRELIALWKFRPPSRFDFTLDNESFAFFSYQYILYGMNFETDYEAARGSLQHTDLANHLFARISQFGDQASKDLVSHRQLINAVYKGGFVERPNAPMAVAR

SEQ ID NO: 107 - protein, 498 aa, Asticcacaulis sp; identical to SEQ ID NO: 22

SEQ ID NO: 108 - protein, 559 aa, Dyella thiooxydans; identical to SEQ ID NO: 54

SEQ ID NO: 109 - protein, 511 aa, Euryarchaeota archaeon; identical to SEQ ID NO: 11

SEQ ID NO: 110 - protein, 497 aa, Albimonas pacifica; identical to SEQ ID NO: 57

SEQ ID NO: 111 - protein, 492 aa, Pseudoalteromonas byunsanensis; identical to SEQ ID NO: 20

SEQ ID NO: 112 - protein, 537 aa, Euryarchaeota archaeon; identical to SEQ ID NO: 15

SEQ ID NO: 113 - protein, 495 aa, Nostoc minutum
MNFHIKKVAIVGGSSAGLLSAVTLKYFFPKLHILLLYSKKHAPIGVGESTTAWFPQFLHEHLNISREEFYKSIWPVWKLGIRFEWGVPHISHFNYTFDGQFRYESQLLSKIPGFYCMHDMRQASRYSILMDKHHAPLLHDGKGNIKILSDGFGYHIDVYEFINYLTAKALSLGVDIQDLEVLDAKLDEYGNVQHLCCADDLKVNADLFIDCSGFKSQLLGKALQEKFISFGYRLFCDSAIVGNWKRRSPIFPFTTATTMNSGWRWRIDLRDRVSFGYVYSSSFCSQDEAIQEYLSLTPYATEDLRKISFRSGRYKRFWVNNVIAIGNASGFVEPLESTGQHMIVETIWRVVLALQDSNLCPTPKLIDATNRYVVDLWDEICDFLTLHFKFNRRLDTPFWKYCQEETDLGSLQNLVELYQDSGVCHAIAHLIPKSSIFEIDGYLTLLCGQQVLVKNLQPMADAEITEWLKYRQILHNNLENSVSPQEAFYFLESLY

SEQ ID NO: 114 - protein, 503 aa, Cylindrospermum stagnale; identical to SEQ ID NO: 58

SEQ ID NO: 115 - protein, 489 aa, Nonlabens sp.
MKIYIIGGGSSGWMTATTMLTKFPDADITVVESPSKPPVGVGESTTQYFRIWADYVGLKDEDWMVACDATYKISVRFSNFHDVDDTPWQYPFGSPNYNLAHPDVWFWNQYKRGWSNDKFARDYWIAAECAEHNLLPIKDPNFKIKKNTGFHFDAVKFAEWLRDNKCQSVKRIIGTVDDFERVGDDIKYLWIDEKQHEADLYFDCTGFTSLLNNSEWLDYSDWLPNDTAWVTRLEYKDKQEELKSYTQCTALSSGWVWTVPTFARIGTGYVFSSKYQDHQSALKEFASFLKYDTEEFRKIHFKTGRKKEIWCGNVVSIGLSGGFIEPLESNGLLSVHEFLLKFCRMWKPRTTQMMRDTYNKAVAFAFDGFASFVALHYALTQRQDSDYWKAVSQIRYPDGNMIEAAKITMLEESHNFGTKLNWQNADGDSLYCVMAGHGWNPFTDVIESEILFHGGIPEDSHLNSWTHQWNHARLGVNPLDYYNRTLYAV

SEQ ID NO: 116 - protein, 582 aa, Actinosynnema sp.; identical to SEQ ID NO: 59

SEQ ID NO: 117 - protein, 500 aa, Nostoc calcicola; identical to SEQ ID NO: 67

SEQ ID NO: 118 - protein, 528 aa, Nostoc sp. 'Peltigera membr. cyanobiont' 232
MIPKFHEACILEYRTILIDSFIHVEKTIHNVVVLGGGGGSAGFLSALALKVKMPWLNVVVVHSTNIPVIGVGEATTAWIPWFLHKYLELNREQFYEETQPIWKLGIKFIWGDSTQSHFNYPFVTHLADKLSVLSKSTAYYCLDSTTESSIYSLLMEQNKSPCFQRENGDFVVDERFGYHIENTSFVAYLERRAAELDIKIIDKAVVNIEVAENGYVRQLKFTDETTLAGDLFVDCSGFRSTLLGETLQEPFCSFSSSLFCDSAVTGRWMRDDAIQPFTTAQTMQSGWCWQIDLQDKVNRGYVYSSGFISDDDALQEMKCQNPLMGDEHNLIRFKSGRHQRFWVKNVVAVGNASGFVEPLESTGLHMIGETIKCVCDVLIDSDQQPSPGLINLANLANRAIAQKWDDIRDFLSIHFKFNRRVESKFWRHCWHKTDIGDAETVVDFFQNNGPSPIGQILLRKNSVFGYNGYLNLLMGQQVPTKYQSDNDTLDLDNWRQVKNHFIKNCANALPIQEAIQVVKERKCQWLTS

SEQ ID NO: 119 - protein, 716 aa, Cellulophaga sp.; identical to SEQ ID NO: 62

SEQ ID NO: 120 - protein, 486 aa, Flavobacteriales bacterium
MKKVNKLVIVGGGTAGWITASWFSRRWGSKIDVTIIDKYQPERVGVGEATLLSFPSVMQKMGFRVEDWVKRIDATFKAGILFPGWGREDKVIWHPFGFTSIGDNKVPMYDIWSNYQSKYDVKEISPLYRTAMGNKIELDYIKDTYAYQIDCGKLVTFLHDNCNKICNYIQSDVKTVVKVDDDVEKIILEDGSEIKADLFIDCTGWNQLLIGKEDNVDLSDRLFIDSALAARVKYENPDKEMHPYTDCQAMEHGWRWRIPTRSRIGTGYCFNKNITSPDEVAKQFSEHWNGRIKPEDMRLLDWKPQMIDKFWKGNVVSIGLSAGFIEPLESTGLAMMIRGCEYLEESLYGCIYNPVFEPDIYNIRMKASFETAVDYVNMHYSYSERKGKFWDYVRLSHEKSGMQILMENQILDPNNETLQTDKISSFFGGTNWHIWLLQLMPEITKKTYWYPDTVDILSRFEKYIQTLDNNVKEATPQKILLKEWYG

SEQ ID NO: 121 - protein, 479 aa, Flavobacteriales bacterium
MKVKDIVIVGGGSSGWMAAAAISRCNDVKVTLVDKEVPTPLGVGEATLLSFEKFMVEQCGFNPNEFLGELDAGLKAGILFKDWGHKGNEIWLPFYWLNYPFTDPPVSMVDAWSTSQDIDFKKLEVLYQCSMDNIIDRTQIGEGYAVHIDCIKLIKYIKEKISDRITYVNSSVKAYLGGNTLYLENGDKIEADLFVDCTGFKSILKRKRDRVNLSDRLYVDTAVAGPIEYEDKHNEFRPYTTTTAVYDGWIWNTPLQSRIGTGLVFNRNITPIDQAKEYFCSFWDQRTTPDKLKVIDWTPYYDTNQWEGKVVSIGLSAGFIEPLESTGLGLIIEGIKTLSKLLNDGFCNEYDVNYYNNHMTLAYEQCVDYVNCHYSKSNIKSPFWDYVRDNYKMSEAQEVFLDEMSSENKTIMPGGKGFIFGVGNWIHWLIQAGYPLEPRSWMKHDKMDESLNHLIECEDKKIELGTDLMGHNEFADKFL

SEQ ID NO: 122 - protein, 347 aa, Chromatiales bacterium
MVPYGYHLDAAMLARFLKRKATEAGVEHIEDTVTDVTVSDGNITAVTGVKASYSADVFIDSTGFRSLLISKLKADNWQSFSDALPCNKAVAIQRALPQGHSPNPYTVATALSNGWVWQIDLTSRQGTGYVYDGNRLSKEQAEQELRDYLGWHSDVIKCIHLDMNVGCRKEFWVGNCIAVGLAGGFIEPLESTGLHLINLGARLLGTHLMQPHPTQAVKDAYNKAMNGFYQDLKQFIVLHYCLSNRTDTEFWREAPAKAQLCEGLPEKLELWKHKICEYHDLAGGYATTFVDENYRYILYGMQHYPALQYHSAETDKEVFARLQQLSDKAVEMTLPHVEFLQKIAAVR

SEQ ID NO: 123 - protein, 523 aa, Pseudogymnoascus sp.
MTVPTKCTVLVVGGGPAGSFAAAALARESYEVVLLEADKFPRYHIGESMLPSMRYFLKIIDFYGKFNEHGFTRKNGAAFQFNRSQPEAYTDFIAADENGYAWNVVRSEADDMLFRHAGACGAHIFDETKVMAIQFAEVNGLAAINGSNGHAEKKIGKPVSATWTRKDGTSGTVSFDYLIDASGRQGLLCTKYLKNRTINPNLKNIADWGYWTGGAKFAPGTRMEGAPYFEALEDGTGWGWYIPLHNGTVLAKKKQMASPSSKDFYISWLGLAPEIKKLLVHATLDGNIKSASDWSYHASTYAIPGARICGDAGCFIDPLFSSGVHLAVLGGLSAAVTIAAVKRGEVSEERAMSWHSKKVTESYMRFFLVVSTGVKQIRSQDAPIIRDNDEVGFDRAFDIFKPVIQGRADADSTGTLSTEDIHKTIEYCFNALMHISPNNALIDKLKSVYDLGGNDEIKAKAITDLKKTPTVEESQELKYILGFVEDMFTIDNFTLNSIDGLVPRTERGMLDLEVAHNAAYHRY

SEQ ID NO: 124 - protein, 537 aa, SAR202 cluster bacterium Ae2-Chloro-G2
MQKVSDVDILVIGGGPAGSTAASMAAKYGLSVKICEKSKFPREHVGESLLPASIPILEELGLGEKIKKAGFLPKYGATMVWGRDKTPWSWRFSETNKQNTHSYQVSRPIFDEILLRRSEELGVSVEEEATIDKVNLEESNRGAFVTSLNKGQYFQPANFIIDASGQSALIARSLKIREWDESFHNLAVYGYFSGATKLETPDENNIFIESYQNGWVWSIPLADGTTSVGVVVDSKNASTQLQKTDPTAYLLSELSLSPKTSDMLLNSNLTTNAKVVKDWSYTTSKMAGNGWALAGDAACFIDPLFSSGVHLAMMSGVLSSAYAVTYLKDRILGEESASVYETTFRQEYDHFRDLALLFYSSNRTVDSYFWEARRLFKEENYFSDRTSFIRAVSGQSVRGYERVALERGELPNEFMSAINLHNEESEKRNAHLLKIQNSIQMQVPTLSNEVKLEKKPVLSEGEFQWGTVITTPFRKEGVPCSNLVANLLMKIDGKKSLIDIVDDLSRSASESAKEKLLKYSIDTISILYVEGVIDNLS

SEQ ID NO: 125 - protein, 575 aa, Talaromyces marneffei
MAIPEKTTVLVIGGGPAGSYCASALAREGIETVLLEAEKFPRYHVGESMLPSLRHYLRFIEADKKLDAHGFIRKNGALFKLNSKPAAYTDFVGAGGPNGFSFNIIRSQADDLLFRHAGTSGAKIFDGVKVNSIEFVPSGLPRSDDPDCEIPDPGRPVSASWVNKDTGDAGSIKFDYLVDASGRQGLVSTKYWKNRKMNTGAQLQSVATWGYWTGGGIVEKGTSREGCPYFEAIADASGWTWYIPLHNGQWSVGVVMNQKVLADKKRAAGDGKNVYLQTIRETPGLQALLENGELVTELRSASDWSYNATAYSSPYLRVAGDAGCFIDPFFSSGVHLALTGGFSAATTICASIKGQTSEIGAAIWHTKKVSESYTRFLVIVSTALKQINEKDEPVISDFDEKTFERAFKHFRPIIQGTVDVQGKLSQAEVSQALNFCFRAFHQVDSKEKQNLIEKMRSLAISDPDDLSNEKYSAALKELEAVLTPDQLHILQTIRARQMLRPEDMFTVETIGSDVIDGLSVNMVTGQLGLVHPGKAFKVAPSNKDILALLNGEELSESSIGFKTDPGYQNPTAAAH

SEQ ID NO: 126 - protein, 513 aa, Aspergillus luchuensis
MTHAYCKYSECTVLVVGGGPGGSYAASVLAREGIDTVLLEADVFPRYHIGESMLPSLRHFLEFNGALPEFEAHGFNMKKGAAFKFNSKPPGYTDFLKAGGHHNYTWNVLRSEADSILFHYAGECSCKTFDGVKVTSLEFRATEPSVNGNVGFPESASWTRRDKSTGSIQFEYLVDASGRAGLMSTKYLKNRRYNEGLKNTAIWGYFKNAATYGVGTSMKGSPYFSLLEDASGWTWAIPLHNRTTSVGVVQHQNSVKAKKQAMGSPSSKDYFLSCLHEVSGIMDFIEGAELVSEVGSASDWSYNASSYAATNVRIIGDAGCFIDPLFSSGVHLALLGALSAAATICASMKGQCSEQAAGEWHSEKVREACTRFLLVVSSAYAQMVHKDRPVLNELGENSFDRAFDIFRPIIQGTVDANGKIAEKEVQESIEFCVRVLQKIDHEQSGVDTESARAGHIFQQDELENMKHIIMNSNETFTLDSFGADIIDGMTANIKRGSLGLEIVGDTCSHDNFL

SEQ ID NO: 127 - protein, 582 aa, Ophiocordyceps sp
MSIPDTCTVLVVGGGPAGSFAAAALAREGIDVVALEMEKFPRYHIGESMLPSMRHFLQVIDFYDDFNARGFTKKVVSPISLLVKKTSSACQRILAYQLTTCLPSRTARHSVSIRLNPMPVQLDFLAAGGPDSHAWNVIRSEADEMLFKHAIASGARAFDDTKVDAIHFTNGVGGSEESKLGRPTSAAWTRGDGSSGTISFEYLVDASGRNGILCKRYYKNRKVNDNLKNMAIWGYWKGSDTYGSPGTRSENMPYFETLQDASGWCWHIPLHDGTHSVGIVLNQDLATKKKHELGSPQTKDFYLKSLQLVPRTSQLLSQAELVSDIKSASDWSYCASAYAFPYVRIIGDAGCFIDPYFSSGVHLAVMGGLSAAVTISASIRRDCDEETAASWHSKKITESYNRFFMVVSYMAKIMFSKNEPEIEGTYNEGVQNAFDILQPVLQGTTDANTSGNISLVEMFKMFKFILVALTGSSTEQVDDLVAKLEAPGFDAETDPAVTEIVKSFQESLSIEESHVFDLLQNMRWYLQDYYTIDSFTLNPIDGLVTCMERGKLGLVSADKKKAGKSLACRVESSARQACDEVN

SEQ ID NO: 128 - protein, 443 aa, Bacteroidetes bacterium
MNKFYDAIIIGGGPAGSTMASKLAEKGQHVLVLEKAKFPREHVGESLLPFLYHLFEELGVLDEMKARFSRKPGVTFSNIDGTEASHWCFKHVIKDESGLSFHVRRAEFDDMLLQNSRKKGAEVMEEVSVQKVDLDIDPNQATVYAENAQGEQLQFTGRMVVDASGQNTILATQMKTKKPFESLTPRVAYSSHWENAKLTPELAAGNIKIVHLEGEKMGWFWMIPLIDRLSVGVALNMSYANQQRRILKETTTDWQAKLYEQELQESLVAQEVLAGATRMGPVMANGDFSYYSSTKWGTNFVIVGDASGFLDPIFSSGIYLGMKSSLLVAEGITDMLGGNGTATIETAYSDIQGAYKLVEKLINTFYEPGSIKWDQAGSAFDLSYKKFETAYSILHLILAGDFFKNHAKYFKAIDILRTPQKIEQYKHLIGHDEPTMEQRVCIA

SEQ ID NO: 129 - protein, 475 aa, Sorangium cellulosum
MQGHSVLLLEKEKFPRHQIGESLLPATTYGICGLLGIRDRIERAGFTRKQGGTFRWGKSPEPWTFRFAENPRVPGGYAFQVERSVFDKMLLDAAREKGVDVREEHAVVRVEQEDGRFSRVRFRDDRGSERTATAKYIVDSEGHRGQTYALVGERVFSQFFQNVALYGYFLDGKRLPAPSSGNILCAAFRDGWFWYIPLSDRLTSVGAVVSREAAQRIQDGPEQAFQSFVDSCPIIAEYLASATRVTEGVYGEFRVRKDYSYCNTRFWKPGLVLIGDAACFIDPVFSSGVHLATYSALLAARSINSCLAGDIDEEEAFEEFEFRYRREFGNFYQFLLSFYDMHQEADSYFWKARKVLNTDEKANDAFIRLVAGASSVDEPAFNHAEDFFRSRQGMGQWLEGMLSNQLAMQVDGLPGQSAPATLEGGPDAEQFMEGFTAEVRQIQTQAMFGHRRARESSVRPQGLIPSTDGFAWQRG

SEQ ID NO: 130 - protein, 367 aa, Acidobacteria bacterium
MKMKTDVLIIGGGPGGATAAMLLIREGIKPIVLEQETFPRFHIGESMTGEAAQLLRRLGLEEKMLSANYPVKHGVKVYGADGVNAWFIPVCARTPDWKLTPGTTWQVRRSHFDGMMLDEAAKRGANVIRGKAVKPLLGEDGSMRGVTMRRPDGSHEDIEAEVTLDCSGLATFLANQRVTGPKYVGNYDKQIAFFSHATGAVRGSASSGEDAKDNTLIFYLKKFHWAWFIPIDDEVVSLGLVVPTATFQESRQTPEEFFRSTLPGINPALARKVSDIQLVEKVHVIPNYSYQVRRFCGKGFICIGDAHRFIDPIFSFGISATLREAEFAVPHVLAYLGGKGRDLANPFAEHMLFCEKGTDNLEDMVDL

SEQ ID NO: 131 - protein, 459 aa, Verrucomicrobia bacterium
MKMKTDVLIIGGGPGGATAAMLLIREGIKPIVLEQETFPRFHIGESMTGEAAQLLRRLGLEEKMLSANYPVKHGVKVYGADGVNAWFIPVCARTPDWKLTPGTTWQVRRSHFDGMMLDEAAKRGANVIRGKAVKPLLGEDGSMRGVTMRRPDGSHEDIEAEVTLDCSGLATFLANQRVTGPKYVGNYDKQIAFFSHATGAVRGSASSGEDAKDNTLIFYLKKFHWAWFIPIDDEVVSLGLVVPTATFQESRQTPEEFFRSTLPGINPALARKVSDIQLVEKVHVIPNYSYQVRRFCGKGFICIGDAHRFIDPIFSFGISATLREAEFAVPHVLAYLGGKGRDLANPFAEHMLFCEKGTDNLEDMVDLFWEQPFAFATFVHHRYREQMIDAFAGRVYPSEQQPSPAILAFRKMLKRTRDYEHEDDYSIPIGSRFHPERAAIWEPNSPLPATEEWMFAHSS

SEQ ID NO: 132 - protein, 492 aa, Penicillium nordicum
MSIPTKATALVIGGGPGGSYAASALAREGVDTVLLEADVFPRYHIGESLVASIRPLLKFIDLDDTFVNYGFVRKNGAAFKLNNQKEAYTDFILDPGAGTYAWNVIRSECDELMFKHAAKSGAKTFDGAKVTSIEFIPDETNVESPGRPVSASWKTKDGRTGIIDFQYLVDASGRAGITSTKYLKNRTFNSYLKNVASWGYWRGATPYGVGTPVEGQPYFEALQDGSGWVWFIPLHNGTTSVGVVMNQEMATKKKKVSSVTSSQAFYLESLEGARGISRLLEPSTLEGDIKQASDWSYNASSYGSSHLRIVGDAGAFIDPYFSSGVHLALSSGLSAATSICASLRGDCEEEAAWKWHSQGVANRYGRFLLVVLGATKQIRARDTPVMNKDGDEGFDDAFTVIRPVIQGIADVPGRTTHREILDAVAFSTNVVGPDIEGTEQAWVEKDHGALSCEEEEVGRVMNNLAKAYKAQDVYEGLTARLERGALGLQVAN

SEQ ID NO: 133 - protein, 548 aa, SAR202 cluster bacterium
MSQTASPYDVVVIGGGPGGSTAATMLARQGLRALLLERDHFPREHVGESLLPASIPVLEELGALPAIQQAGFLQKWGATMVWGKDPEPWSWYFKETNPKYPHSYQVSRPEFDHILLDNSRQAGVEVREGYRATRVTFEGGRAVGVRCESSTKEPLEIAAGFVVDASGQGGLLARQLGLRQWDPFFRNLAVYGYFQGAQRLPEPDETNIFIESYPQGWLWTIPLHTGLASVGAVVDSETGQEGIRRLGPRGFLMDQLSQGPATAEMLRKAELSSGPDVVRDWSYVCKKTAGPGYVLVGDAACFVDPLFSSGVHLALMSGVLAAALVTSSLSDPDIEEAAGQVYQELYIQEYNQFRELARLFYSSNLSSDSYFWEARRLTGKDAAFTPRQAFIRTVAGQPPRGYERAVLEHGDAPSEFISSVGQVETDRARRQADLSAFLDPSGAMHHMFYSAVPSLAPGVTVVRKPVLGEGRFDWGNVIVTPSQPEGTPCSALVAEVASAIDGRTPVRGLMAKLQEDRDPSSAPIIEQTVVSAVQILYVDETISELISQ

SEQ ID NO: 134 - protein, 552 aa, Trichophyton soudanense; identical to SEQ ID NO: 64

SEQ ID NO: 135 - protein, 1069 aa, Trichophyton violaceum; identical to SEQ ID NO: 60

SEQ ID NO: 136 - protein, 531 aa, Agaricus bisporus var. bisporus
MPNAQLPSRTTVLVIGGGPAGAYAASALARENIDTIVIEAAKFPRYHIGESMLPSLNSFMRFIGAEEKLRDHGFTTKLGAAVKFNQHKKEGYTDFTRGDVRNASCNVIRSEFDNMLLRHAEESGARVFEETKITDIEFETNGAEMRPTSATYTRKNGEVGVVHFDYLVDASGRNGIVSTKYLKNRKMNQSLHNLACWGYWTGQKQYMPNSSRHNAPWFESLTDESGWAWFIPLHNGTVSVGIVMDSSISAQKKAEGRKATSDGNYTLRDHYLDQIQLVPGLKAFLEEATLKEDGEHYVIRSAADYSYAADKYAGDHYRIIGDASAFIDPFFSSGVHLALLGGLTAAASIAASIKKQCAEEVAWKFHDVKVATAYTRFLLVVMSAYKQIRNQSVAVLSDVDEDNFDRVFDIFRPVIQGNSDVGKNLSENELERTIDFCKDIFAPTDPEMIEAVGARLRPELLAANSPILTNEEINIESQGDDEARIVLHRLNARKPVNQMYQGPDNLQVGDVGGYVAHIQVGALGLVEVAST

SEQ ID NO: 137 - protein, 530 aa, Coprinopsis cinerea; identical to SEQ ID NO: 36

SEQ ID NO: 138 - protein, 502 aa, Melittangium boletus
MLNIPASTKVLVLGGGPAGSTAASFLARAGVEVTLIEREMFPRYHIGESLLPSCLEIADLIGARQKIEAKGFVKKPGAYLEWGREKWSLDFGELQGQHTYSFQVDRSEFDELLLRHSEEQGVRVFEGVEVKSIENNAEGRPVKAVWAVHGDESQTGEISFDYLIDASGRHGVMSTRYLRNRQFHKVFQNIAVWGYWEGTQKGADYRDGAIAVGSIPDGWIWAIPMSGGKTSVGVVVHKDSFQAQKREADTAKIYEDAIASCPLIQRVCSGAKLVTGLKTESDYSYAAESFCGPGYFLCGDAACFLDPLLSTGVHLAMLSAMLSAAAITSVVSGEVSEQEAQSFFEKSYRQAYLRFLVFVSVFYDQRCGKDNYFKEAERLSQYEKDPSRLKQAFLNLVSGLEDLSSAEQATSHLIGEMSRRVTENLTLRKDKSTLASGSEEIKGRAQDNARFFDGVEGIPVMTPEGAIDGLYVVLKPRFGLGRFVATVEASSIVNVKKEEVRL

SEQ ID NO: 139 - protein, 528 aa, Halobellus rufus; identical to SEQ ID NO: 50

SEQ ID NO: 140 - protein, 421 aa, Chromohalobacter japonicus
MHTEASLQAADCDVAIIGAGPAGAAAAARLSRLGWRVHVIERSHFPRFSIGESLLPQSMAYLEAAGLLETVQAGGYQPKNGAAFTRHARTTTIDFREKSTPGWGTTYQVPRADFDQRLIHAAEAQGATLEFGTTVTAFNADAARPVLQLEDEQGTTRHLSARFVLDASGYGRVLARLEALERDPRAEPRMAIFSHVEDGIEDADYDREKILIGVHPEDAGIWYWLIPFADGRASVGVVGDIETLTAHGDSPEARWQALLDQEPRFRQLLHQARRVREVNEIRGYAASVTRLHGPGYALLGNAGEFLDPVFSSGVTIALHSAHLAAPLIDRQLHGEKIDWHADFETPLRAGVDTFRAFVEAWYAGTLQTIVFHEAPPPRFKRWISGVLAGYAWDRDNPFVTASRRRLATLAEVCAQRDEVRS

SEQ ID NO: 141 - protein, 413 aa, Photobacterium leiognathi
MLNNRQRTQVAIIGAGPSGAVAAALLNQHKVDVVVLEKNTFPRFSIGESLLPACMEVIKKANMVDAVNAADFQYKNGAAFRRRDTYTAFDFRDKFTDGAGTTFQVQRGNFDKVLADEAAKQGVEIRYQHNVEAVDCGDSTSVLTVRDEVSDQVYQLEADFILDASGFGRVLPRLLDLEQPSCLPVRHAIFTHVVDHIEDSGVEHDREKILISVHPTNEDVWFWLIPFSNGTCSLGVVAEPAFLAQYDADEKTALQQIVAEEPTLNKLLSKAEYSNPAAQIGGYSANVKNLATNNYALLGNAGEFLDPVFSSGVTIAMQSADFAVNALLKQLAGDEVNWQQDYADKLMVGVNTFRTYVEGWYSGELQKVIFYTDPEPKIKQMVCSILAGYAWDQNNPFVAQSERRLRTLAEICS

SEQ ID NO: 142 - protein, 427 aa, Halomonas titanicae
MATGAAKQMKTHDTTDVAIIGAGPSGAAAAAWLARRGINVRVIERQRFPRFSIGESLLPQCMVHLEACGLLDAVQTGDFQFKNGAAFTWRDRYAAIDFRDKFSPGPGTTWQVERADFDQRLIDGARQAGASVEFETQVEAFVADHDRPSLTLVDANGEQRSLQARFVLDASGYGRVLARLTGLARPSTLESRCALFTHIEDRIDCSHYDRDKILIGLHPEHSGIWYWLIPFSQGRASVGVVGDRATLEAAGVDDKERLWHFLHAEPRLNKLLVNAKAIRDIGRLEGYSADVEQLHGPGFALLGNAGEFLDPVFSSGVTIALDSALRAAPLVERQLAGEKIDWDSQFEQPLRRGIATFREFVDAWYDGRLPRIIFNDQQIPRIREMISSVLAGYAWDEENPFVAASRRRLHSLAEACSDISSHATGEG

SEQ ID NO: 143 - protein, 585 aa, Myxococcus xanthus
MSGAWEGKLYDVIVMGGGPAGATLAARLRKDPGLSVAIFESERFPREHIGESFVPSAVSSLQESGALGRVLSSDCWIKKGGGYYSWDAVRPWSTFFEHKAYERDGYRRWAFHANRAELDDILLRHAEENGAEVFEGTPVKQVYRRDGFTEVDLGEKGSARCKVFVNASGRYSVTSLGGPREFLSSYRNIAIWSYIRKGKPAQSLPGDWNIFRESGVSPIGSFAFEDGWFWYIPIPLEVDGRREVVHSLGLVTDPRGLKSKRDYMSPSVFMETARKVPFLCDLVADAELIYDEFRTTANYSRISHQMCSWENREIRVGDAAFFVDPLFSTGVHFALHHTAAAAVLVRAAFDEAMPEQHREDLWHDYDQMLRKQAQVFSLAIDQWYNEISLAHPGSVYWRERSERATFEVRNATFHYLVNGSLDEDLLHVISQGNDAVEALSETGAWRTSFAQLQRLRPADDALVQLMPNVKFRQSVTLEHPIADSAEDKLDARPQAFDHGPYWESPERHAHEVAPRFGRPSPCLRFYFEDGDHQDTVRILWNRPNSALLERLSQPHAYGPLLAGCSLSERGLLDQLLLKGMMRVIP

SEQ ID NO: 144 - protein, 406 aa, Pseudoalteromonas phenolica
MDQFKSYDVVIIGSGPAGSLCGIECRKKGLSVLCIEKDEFPRFHIGESLTGNAGQIIRDLGLADEMNAAGFPDKPGVNVIGSLSKNEFFIPILAPTWQVRRSDFDNMLKRRALEHGVEYQQGLVKDVIKHEEKVVGAIYKADGVEHQVRSKVLVDASGQNTFLSRKGIAGKREIEFFSQQIASFAHYKNVERDLPPFSTNTTILYSKQYHWSWIIPISPDTDSLGIVIPKDLYYKECKNPDDAIEWGMEHISPEIRRRFKNAERVGESQSMADFSYRIEPFVGDGWLCIGDAHRFLDPIFSYGVSFAMKEGIKAADAIKRAIDGNDWKTPFYEYRDWSNGGQQIAADLIRYFWIYPIFFGYQMQNPDLRDEVIRLLGGCCFDCEGWKAPTIFRNAIEEYDRKQMAG

SEQ ID NO: 145 - protein, 449 aa, Acinetobacter baumannii
MGDYDFDVGIIGGGPAGSTMASYLAKAGISCAVFEKELFEREHVGESLVPATTPVLLDIGVMDKIEKANFPRKFGAAWTSADSGPEDKMGFQGLDHDFRAAEILFNERQQEGVDRDFTFHVDRGKFDRILLEHAGSLGAKVFQGVEVADVDFVKPGDVRLNVKLGNQKVGIRTRMVVDASGRHVLLGRRLGLREKDPVFNQFAIHAWFDNFDRRSATRNPDKVDYIFIHFLPLTNTWVWQIPITETITSIGVVTQKQNYTKSGLSYDDFFWEAVKTRENLYDALKASEQVRPFKKEADYSYGMKEVCGDSFVLVGDAARFVDPIFSSGVSVALNSARIASKDIIAAVRNNDFGKASFAEYEGMIRNGIKNWYEFITLYYRLNILFTAFVQDPRYRLDVLQLLQGDVYSGERLKVLDKMHEIVATVESDPDHLWHKYLGDMQVPTAEPAF

SEQ ID NO: 146 - protein, 567 aa, Serratia sp
MTQNSPANGRDSNHFDVIILGSGMSGTQMGAILAKQQFRVLIIEESSHPRFTIGESSIPETSLMNRIIADRYGIPELDHITSFYSTQRYVSSSTGIKRNFGFVFHKPGQEHNPKEFTQCVIPELPWGPESHYYRQDVDAYLLQAAIKYGCTVRQKTKVTEYHADKDGVAVSTAEDERFTGRYMIDCGGPRAPLATKFNLREEPCRFKTHSRSLYTHMLGVKPFDDIFKVKGQRWRWHEGTLHHMFEGGWLWVIPFNNHPKSTNNLVSVGLQLDPRVYPKTDISAQQEFDEFLARFPSIGAQFRDAVPVRDWVKTDRLQFSSSTCIGDRYCLMLHANGFIDPLFSRGLENTAVTIHALAARLIKALRDDDFSPDRFEYIERLQQKLLDHNDDFVSCCYTAFTDFRLWDAFHRLWAVGTILGQFRLVQAHARFRASRDEGDLDNLDNDPPYLGYLCADMEGYYQLFNDAKAEIEAVSAGLKPTGEAAARIHALIDERDFAKQMFGFGYCITGDKPQLNNSKYSLLPAMKLMHWTQTSAPAEVKKYFDYNPMFALLKAYITTRISLSRKK

SEQ ID NO: 147 - protein, 556 aa, Saccharopolyspora erythraea
MNTQRHSNDKTPYDVAILGTGIGGSMLGAILARHGAKVLLIDAGQHPRFAIGESTIPYTLLTLRILADRYDVPEIKALATFTDTSRTIGNTFGVKKHFGFLLHHENEPQDPREVSQFNTPGLLHEAAHLHRQDTDAYLFHVAIRYGCTARQNCRVAEVEFDDSGVTLETVNGEQFRTRYVVDASGFRSPLAEKFGLREDPCRFKHHSRSLWNHMLDVTPTDKVLDRPREHRPPVPWYEGTVHHMFERGWFWVIAFDNNKLSSNPLCSVGLTLDERRYPKPTDISPEEDFYRHAARFPDVARQYEGAKPAREWVSTPRLQYSSSHTVGDRWCLLAHAAGFIDPLFSRGLSNTAEAVNSLSWRLIRAVKDDDFSAERFEYVDRLQQRLLDHNDELVNAAFISWCDYDLWTAVFRAWASGTNAGSYRLSKAITEFAKDGRDEHFMALEEPPHLGLYWPDHDGFAKFFESMVSQCDLVEQDMLSPRQAADNIYTQLREADFVPKHFGFAERGQRFINPTPMRFIKTVRWAMREGDPKLRGLIINNAKEALKARVKGQKLY

SEQ ID NO: 148 - protein, 437 aa, Enhygromyxa salina
MTSSTQDVIIIGGGPGGSALGSYLSKAGISNTIFESAIHPRPHVGESLVTSTTRIFQDIGFLETMEREGFVRKYGASWHPIKRNAELTIEFAEFPQEGIEQDYTYHVDRARFDALLLKHASELGSTVYQGTEVKQVLMEGDRACGVRVAVAGQTIDVPAKLVVDASGRRAVLGRQLKLLEKDPQFDQFATHAWFENVARSATGRLHDIHIYFLPVERGWVWQIPITETITSVGVVVEKRDFVQNKGEIEAWFHEMLCSTPDGAVAMQDAVRINEFKREGDYSYRMSRFTGPGYLMIGDAARFVDPIFSSGVSVATYSAKFASEAIHRVLRGGEDEATAFDDYATTLGAGCSIWYEFICLYYRLLPLFTLFIQNDDYRMQILRLLQGEVFQREEVTVLDAMRRFISAVEANDEHLMRPYLGDVDLSVVDELRVPTRAP

SEQ ID NO: 149 - protein, 487 aa, Verrucomicrobia bacterium
MNSITIVGGGTAGLITALILKKRLDVKIQAIVPSNIGIIGVGEGSTEHFDDFRQHLHLDVKDVLRETKGTLKSGIMFEDWTNKHSRYLHHIHSMWNIKLGLSARNYEYLMINNKGASCFAPMTLFHNEVGLEPSDRLVQYHFNTFKLNEYLIKLCKENNINIIDDEIVDVNLNDKGIKELKGKKKTYKSSFYIDCTGFKKLLISKLGAKWQSYSKYLKTNSAIAFPTGDQEDYNIWTLAKAMKYGWMWQIPTYGRTGNGYVYSDQYTNKEEAKKEIEKLLGKEIEIAKHIKYDPGALDKPWIKNCVAVGLCANFVEPLEATSIGTTIQQAFLLMQYLENYNQQSINIYNKQVSTVMENVRDFIQLHYINDKKTTNFWKDVNKVEPSDTLKQYMHVWKSGRLLKSTDMESIGHYNLFTLFKEDNFNLIAYFNGLIDTKLLRNSYNIVNKNLKRYWLENRIEGDMLWRNTDRTRKMSHKKYIQEIHDKN

SEQ ID NO: 150 - protein, 975 aa, Trichoderma virens
MANIPEQCTVLVIGGGPAGSYAASALAREGIEVVLLEAEKFPRYHIGESMLPSMRHFLKFIDAYEKWDAHGFNIKKGGAFRLNWSRPETYTDFIAAGGPGGYAWNVVRSEADELLFKHAAECGVQTFDETKVASIEFAPATSDVQSLGRPVSATWTRKDGSSGTVSFDYVVDASGRAGLISTKYLKNRSYNQGLKNVASWGYWKNGGVHGVGTHKEGAPYFEALKDGSGWVWFIPLHNGHHSVGVVQNQEMAAKKKREMTEPSSKGFYIESLDLVPGIKELLANAELVSEIKSASDWSYSASKYAFPGVRIAGDAGSFIDPFFSSGVHLALSGGLSAATTIAAAIRGDCGEKAASSWHDKKTAESYTRFLLVVSSALKQIRSQDEPVINDFDEATFERAFDLFRPIIQGQADADAKGKLTQAEISKTVEFCFKAFAHVSFEEKEALVKKLKELGLDGDAYDESNRKALDELEKKLTPEEQSILKTLKGRRMVRPEDSLNIDNFTLDSIDGLAPRLERGKLGLATAKKAEVKFTRHDPLSFLNGESKAVKKALQNGHAELNERSEVHSTNVTNGDKPLNGHTKVEDQSVASLVAELVASERSLPQASLDESSRHRLISSLQESAEELETPYDSMLRFLNASRQIALIKIGGDLGIFKCLAESKTPLSSKELAKPNMADPTLVGRIMRYLVANRLAAETAPDQYVARKMTYALADPQIEGPMRFFHAVSSPSFQALPDFLKETGYQNQPQTSALQKGLNTDLGLFAWLKQHPDLLKDFQNLMGIPKEGNCLDVISFESAVIGGHEGPVFVDIGGNTGHQAKQLLAKYPELANRVVVQDREETIKSASDVKGFQLMAHDFFSPQPVQGAKYYYLRAILHNWDDDKASQILSNIVPSMSTDSLMLIDELVIADQGSHVWPAGLDLQMYTLFGSSERTASQWDSILDRAGLRPVAVKKYAPVMGSSVIFAAPKFRCYTTL

SEQ ID NO: 151 - protein, 644 aa, Trichoderma virens
MAATAPVPKHTFAERAAANNLSDSQILNSNNVAGSSLPKESDVVIAGGGIHGLIYAIHSAKHKPGNLKILLVEKNRKPGYKIGESTLPVFSMWCKMYGLTAEYLLRIFGLKDGLCFYFLDRENQGKFKDFVINGTAGTLLSGFQIERPTSELLFTLLAQRSGVNVYHGTEVNFDGTTVDGGLNKCNIGIAKGKSNDTPETSIQSSILVDATGRFRRVASKNAPIHRFEGWNYDAFWGYFTNPKDTSKMPFPHYESCNTNHICFPEGWIWVIRLLSWEGSPTANLMDMMTYLLDCAESGVPADQIPSTDELAKMFGLNYRWITSLGFAVRNDVEYPEDMSAYGTREAERRFNYFVEKYPLIKEFMSNFELIEDHYGPGTTWYIRKSLTYQSPVVSGPGWISIGDACGFTNPLWSPGINVGLSTSTYAAELTHKAFDAAKNANPEAAELSIRETMAPYDAYAKRLIPALNQMNCFNYVCFRDPRLGAQISAAWQNIASALQGWGRIQGNYTLTPETFVDYATNWCYGAINPAYDIVARKAIELLAPIPLKDAVPDHIVQEVIEFADSIKKSTLESGCINLRWGGLFRRFDNRLNYLEEKETKDTFARPCSNCSSWFVLRPDWKKCYSCGTERTDEESTILWNPVLV

SEQ ID NO: 152 - protein, 531 aa, Pleurotus Ostreatus
MASIAVPSASTILVIGGGPGGSYSAAVLAREGLDVVLLEADKFPRYHVGESQLASLRHFLRFIDLEKEFEEFGFQRKDGAGFKLNRHKREGYTDFVSQDPNNFSWNTVRSQADELMLRHASKCGAKVFEETKVTELEFEGSEQSGRPVAALWKQKSGATGRITFSYLVDASGRNGIMSTRYLKNRQFNSLLKNVACWGYWEGTGKYLPGTSRENSPLFEALADESGWAWFIPLHDGTTSVGIVMNQDISNEKKAKAKESGEDTSLVAHYLSELKRAPNVLALIGDGVHIKKSDAPLISAASDYSYSATSYAGPHYRIVGDAGAFIDPYFSSGVHLAISGGLSAAATICAEMKGGCTSTEAIAWHSAKVDTSYTRFMLVVLSAYHQIKSQEAPVLSNKDEDNFDRAFDFFRPSKYRTDWTFIQGNTDVGRKLQGDDLRRTVEFCAKHAYEPSLPEERKELVEKFGDPLRVLSAESAEDSEQVATEKRILKGVAIRKLMRTEDIVHIDNFVADNLLGYKLRLIRGSLGLEKVL

SEQ ID NO: 153 - protein, 524 aa, Pleurotus Ostreatus
MSLPRIPQRTTVLVIGGGPAGSYASTLLAREGLDVVLLEALKHPREHVGESMLPSMRQYLRFIDLENEYDIRGFLHKPGAFFKFIHGAPACYADFDILGRDKNTWHVFRAEADELMLRHAAQQGVKVFEEVRVDSIEFAGSDPTTSRPIAANWKSKLGETGALSFDWLIDASGRQGLMATKYLKNRIYREGLRNVAAYGYWEHAAAPVEEGNPRQNATWIECLTDKRGWAWHIPLHNGKTSIGVVMHQETSNQKKAVGPKGLEAHYLDQVKLAPGVLERLGHGASYITGSVRSTADFSYHAKSYSGDHYRIIGDAAAFVDPLFSSGVHIGMTGALSAACTILGSMKEQITEVGACAWHDAKIGISQIRFLLVVLSAYRQMQHQGNYTVLGDFNPQDFGRAFELFRPVYQGQHDVENKLTNEELERMIDFTRNFFLPISQDQHAAVSERLGHFMPINGPVMGPDDLAKVLDDDDSDAKAVLQKINARKVLSTEMGSSGLNSESVNGYTLILEKGRLGMKKEIGVA

SEQ ID NO: 154 - protein, 521 aa, Pleurotus Ostreatus
MSLPRIPQRTTVLVIGGGPAGSYASTLLAREGLDVVLLEALKHPREHVGESMLPSMRQYLRFIDLENEYDIRGFIHKPGAFFKFIHGAPECYSDFDLLGQDKRTWHVFRAEADELMLRHAAQQGVRVFEEVRVDSIEFAGSDSMSSRPITANWKSKLGETGAISFDWLIDASGRQGLMATKYLKNRIYREGLRNVAAYGYWENAPVEEDGSHQNATWIECLTDKRGWAWFIPLHNGKTSVGIVMHQETSNQKKADGPKGLEAHYLDQVKLAPGVLKRLGNDATYITGSVRSTADFSYHAKSYSGDHYRIIGDAAAFVDPLFSSGVHIGMTGALSAACTILGSMKEQVTEVEACAWHDAKIGVSQTRFLLVVLSAYRQMQHQGNYTALGDFNPQDFGRAFELFRPVYQGQHDVENQLTNEELERMIDFTRNFFLPVSQDQYADVGERFGQFTEINGPVMGPDDLAKVLDDDDSDAKAVLQRINALKVLSNEMGSSGLNSEAVNGYTLVVEKGRLGMKKVINA
